United States Patent Application Publication US 2025/0295137 A1 - sequence listing, part 12

SEQ ID NO: 12 - DNA, 1795676 bp, Latilactobacillus curvatus
  source 1..1795676: mol_type = genomic DNA
ttgtgtagttgctgattttcttctgtacttcttcagaaactttaaatccccattgttcataataagggagcatattatagcccgttacttcagagacatgtaacaaaaaatgctgcattcgatcttcatttgaatcataggctaactgattttcgcgataatactgatgtaagatcgggtagaaatcatcgccaaaggtgtttgctagttgggcaaacattgtcattttgacaaagtccccttgttgattgaagtttttatgatcagaatttagataggcgtgcatttctggataatacttatctaaatcaggcatcgcacccgtcatttctttttgcgctgctaacgaataaatattaacactcgattcgacaacttctctccatgtccatggtttttgttgtctctgatgaccacttccatgccagattccccaagggtcctgaagttctaataaacttttcatagctgcatcgcctttaaaacccatgtattcgtttgtcgcatacatataatacgatggcgattctaagaaatgttgtaaatggcgatctgaaaagttaaccggccgaccttcattactgatccctgaaactcgatcttgagcgaccaggaatcggtcataattagccattaacgctttgggatcccccaaatatttctttgccatctcataactcacagtaattaaagcacgatcactaacaagttgaacatcttttgcgtctgtcatttcagtcatttgtttcttaaaatcttcgacactcgtcttgtttgcatcaaagaacggcatttcaccagtggcatcaaagattgacaccctagtaccgcctgaatcatttggattcgtcacataaatagggccatcattttcaactgtaatagtcgtcaccccatttacgagcggatatcgtttctgaacatctcgctcaggcgagccaatcgtcagcgacatcaagtcttgacccgttttgctcaccgtcagcacgtccccttttttggcgtataatccggaaggctctaagcttgaataactcaaggccctttgttgccgagccaattctttattaacatcaccgcggccaatatacagttttgaatatggcgccttttctgaacgtgttacacccttctggtgcctcaccttaggttggaggctatcatcaagcacctcactttgctcactttgcttactttggtaattagaactggtcgtagcccttgcttcttgtaaaatactcatgcaactggtcgttaaaatgccgaacgctaaaatacctactacttttttgatagtctcatctcctaaaaaattatttttggaacacatttaacttaacacgcttcatcaactccgtctataataaacagataatggtttccataaatattatcaacacataaaatccatattactgcgataaacaattagaccgataagcatacaacacgtattatacaaataataaaaagcattcttcccgctataccaaaccaatgaaaaagtcgtctaaattcgtattttaatccccattataaatcattatttttttaatattccaagaaataaaacacgtcaaaaaggccaacgctaagaatttaacgttggctttttaaaaatgatttattttatagttgcgtactaaaaaaatctgtaattatgttcatcagcgctggcttcaccagatggcgttcaccatttgctgttaaaaatgtcacgtttttggcataagtttgacctttaatctgctgttcaaaagctgctacttgttcatagggaattcgttcatctgctgtcccatgccagaataaaacaggccgttgagcaattgcctgcggctgttcagttaaatcgtaggccgttaaccaacttgtcaataaccctagatcgtcaggttgtgctaactgatgcgcacggatattttcacgaactaagcgcgcataggctagcggtgccggcgagcccatgatacaagccgccactttaatttctggatgcttggttaagagtgccgccgttgtcatcccacccatggaaacacccccgacgccgatgcggtcagcttgaattaaattaagttggtgccagtaatcaacaatcaaactgaattcggcaaggttggtttgaatactttgccaaaaagtccatgacggaatctctgaaacaggttgcagccgttcaccatgattcagtgcatccggtaataccacgcgcatcccagcttcagccagtttacgcgcttgcgttaaaaccaattcttttgctgaccgccagccatgatagtaaatcacgagtggtaatggctgatgacgttgttcgtcagcgaccacttccaaaaccggaatccctttaatctggcgttttaagactaataccattagtgaaccctcccccactatttcaagattactataacggaagttggcggggttgtcatcgaattagaatttttcgaaaaataaaaaagccaccagattgatttaatcgggtggcttaaatgtgctccaggcatattcctgcgcttaaccaaatttatcaaatcgacgatgacatcgtcaattcgccaaatccagttaatgctcaaatataaccgcctgcttgcacactctgatctgaaacgtgctttttgaaactgacctttccggttaacctaaaaatagcggttatggctaaaacccgccataatcgctatttttttgttaatcctcaaggtcaaaccgtttcaaaggcactctgtttttaaacatgctttttaaagctgactcttgtgctttgctacatatcgcaaacaatcgactgcgtcgcttattcacgatattaggcaaatgctcagagtcaaaccgctttaaacgcactctacattgcttttggtgcttgtacgcctaataagtctagtgaggcttctaggactgtgctgacactcttcactaatgaaagacgcgcatttttttgatcgtcgtctgccaaaatttttgagtttgcgtaatacttgttgaaggcttttgccaagcgtaatgcgtatttggcaatcactgatggttcgtattcttggctggctttgacaatcacatctgggaagttgccgagcatcttcaagacatcccaagcgttggcatctgaaacgactaagtcagcgtccattgcgacttcttggttggccttgcgcaagatactttgggcacgggcatttgtgtattgcacgtatggacctgtctcaccttcgaaacgcacaacttcttctaagtcaaagtcaaaattatctaaacgatcattcttcaaatcatggaaaataaccgcaccgatgccgacctgttttgcaacttcttctttgtttggtaaatcagggtttttggcttcaatttgttgttgtgctaggttaacggcgtcatttaaaacttcttccaataagatcacacgaccgctacgcgttgataatttcttaccaccttgagtaattaagccgaatggaatatggtgaatttcgtccgaccaatcgttgcccatttcttttaaaacggccttcatttggttgaaatgttcccgttgttcgccaccaacaacgtacaatgattgcacgaagtcgtatgtgtcatgccgatacatcgcagcggctaaatcacgtgtcatgtagagtgttgcgccgtctgattttttaatcaaggctgggttcaagttgtaagctgttaagtcgacgatttcagcaccgcgactttcttgtaagagcccttttgcttcaagtgcgttgaccacaccgtccatcttgtcgttatagaaggcttcaccattaaatgagtcgaattcgacccctaacatcatatagatcttttggaattcctttaatgattcagttctaaaccatgaccataacttcgttgcttcttcatccccggcttcaagcttacggaaccatgcccgtgcttcatcgtctaattctggatgttcaacgtcttcttgatggaacttaacgtaatatttcaaaaggttcgtgattgggtcttctttaacttcttcttcactcccccattttttataagctacgattaatttaccgaattgagtaccccagtcacccaagtgattgattttaattgggttgaagcccacttttgtcaaaatcttggcgattgagttcccaatcactgttgaccgtaaatggcccattgagatgggtttagcgatgttgggtgatgacatgtcgattggcacgttgccccctttaccgaggtcactttggccgtaattagcggcttgcgttaagacggttttgaggatttggtcgctaaacgtagccttatccaagaagaagttgatgtatggcccgttggcaatcactttttcaaagccggcttgatccatttctgcgactaagtcttgggcgatttgttggggtgctttccgtaatgttttcgctaagataaacgttggaaaagcatagtcccctaagtctgatgtttttggtgtttcaatgagttgtgctactttatctgctggtaaactgtcccctaaaacgcccattaaggcagtggtgacttgttgtttaaaatccatgttgatagcctcctaatatttgtgaacaaaaaaagtcccttccaaataaatgaaagagacgagaattcccgcggtaccactctgattgatcaatcgatccactcaatagtatgcaattgttcaaccaaaagcgcgccgcgtcaacttgattacccaccttacaccgtctgtgagctcgctataaatcgctgttgatgctattcttttgactgttcgaacttgataactagtatatagaacttagctgcacttttcaagcgcaattattctgccgcgagggcttcaattggatctaacttagctgccttacgagaaggtgctagtgccgctaagagactgatgataatgctgatgattatcccgaataggacgtagccactggtaattgccacaattggcatatgcgttaatggttgggccaacgtattgacaagcaattgtccaaggccagcaatgccggcaccaagaacacttgataataacccaatcaagaaggcttctgagacgaataagtgccgaatatctttctttcgggcgccgattgcgcgtagaatcccgatttccttcgtccgttctgacacactgatgtagagcaccacgatgatcatgattgctgaaaccaataatgaaatcccggcaatcccagctaagacgtagaaggctaacatcaagtaagtgttaattgaatcgaggatcgcaccaacccctgtgatttggtaatccttttgtgtcttaccgttgactttgctagtgtaggttttgattttattttgaacggctttaacattttgggtcttattaaccgtgactgctgcaaagttgggtgcaaactctaatccttgcgcttggtacatcttggctaatgtgccatatgtgacggcttcagtcccagaattgatgatccctgaaactttcacatcttggcgcatttgaactggacgttgatccttactaatggcattgacgtaagtggttactgtccgaccaaccatcttcttgtaatttttatctaacttcttagccattgccttcgttaaaataatttcgttggccccaggtttagtcccggtcttaatatcttggacacgttcggttttattaaacgtttggaacatttggactgtttcactcttcttttgatagtgcacttggacaccattcatgtagtagcccttttcaaccttcgtcacgtttttgaccttattaaggcggttgatatccttatcagctaagttaccttgttcaccggcttcaatctgtttgcgcgtgaggtttcttgcaatctgaatcgtatttggattaacttgcgatgaaatctgatcattaatatagccagtcaccccttgacccaagcctagcattaaaatgacggagaaaatcccaatggacgcgccaaaaataatgagcaaattccgtttaatatcgtagcgcatgtgttgcattgccattttgaaagcagacataaaacttaatggactactcttcttaattaccggaccagttggagctgggtaagctggttttaattgcttgtcataatcaatctgcccatcaaccatgtggacaacccgtgttccgtggtcagcaacggcttgtgaatgggttacggcgatgacgagtttgccatcttcggcaatcttttgtaagatttcgagaatctcggccgtattctggctatctaacgcacccgttggttcatcggcaatgatgacatctggatcagcagccaaggctctggcaatagcaacccgttgcttttgtccacctgacaattggttgggatgtttatggatatgttccttcaagccaacttgttccaataaggcggtcgctttggcaacccgttccttatgtgatagatcagtcatttcaagtggcaccatcacattttccaagttagtcaaatgactaattaaattaaagctctggaaaataaagccaatcgtttgactccgataagcatcaaatttcttttcggatgcattctttaaagatgtcccatcaacgatgagctccccatcgtattggtgatctaacccaccgatgatgttcagcaacgtcgatttaccgccgcctgattccccgaggattgaaacaaattcgccacggtcaaagcttaaattgatgccttttaagactttaaattcagccttgttcatataataggacttgtgaatatctttaatctctaataatgtcaatgtcgtacgctcccactacttagattgctcgtaagtgtcacgagtttttagtcgatagataataaatatactttatcagagcgcctttaaacaaacaatcggccttaggtctgataacgaaaagagtgtgatgtaagtcgggtatccgccgaggattaaatttcagagaataaaaaagaggttgcaacaaaatttcttctgttgcaacctcttttgcatgaatctttaagcgagtgacgggaatcggacccgcgacgcaagcttgggaagcttgagttttaccactaaactacactcgcattacttgatatagtatagcatattatttccgatttgtgcatattttttgaaaaaaaaaggtttaaacgcttaacaaatagcgtatgtatgcggtatactattgataacaacttgattggagtccttttaatggccgattcgcaaaatacaattcctgaatcaaccgcatttcattgccctgcatgtcaggcgccaattgaatatggtatcaaacgttgcccaggctgtcagactgcgatcttctatcgcgatatgtctgaaacattctggaacgatcgtaaattaaatctttttaaacaaacggatgccattcaacggggcaattgacttaaattaactattcaaccgtcactttttgtgacggtttttttaattgttaataattaattcagaaggcgttaccattgttaatttgatagacttcacgactcattttagccgtatttttaatttgaaaccaacggtgatggttgctataatggcacaccatacacaggaggtctttatgatagagaagaacaaaatgagtttatttagcctagtgatgctcggtttaagttccatcatcggttccggttggctgtttggtgcatgggaggcaacgaccgtggcaggcccagcagccatcatctcttggattgttggcgcaattgtgattggtgcaattgcctttaattacgttgaactcgggacgatgtttcctgaaagtggcgggatgagtcactatgcccaatatagtcacggttcattactcggcttcatcgcagcgtgggccaattgggtatcattagtcacgattatcccaatcgaagccgtcgctgctgtccagtatatgagttcttggccatgggcgtgggctaactggacgaatcactttatgcaccacgctgaaatttcgaatcgtggcttgctcgtcgtctttgcctttatcatcgtcttcacccttttaaatttctggtccgttaaattcttgacccgttttaccagcttcattgcaatctttaaattaggtgtgccattattaaccattattatgttagtctcaactggtttccatactggcaacttcgggcattcaatggcgacgtttatgccctatggttccgccaaaatttttgcagccacttcgatttctgggattatcttttcatacaatgcctttcaaacagtaatcaatgtcggcagtgaaatccgtgattctaaacggaatattggacgtggaattgcaatttcacttgggatcagtattgtgatttatctactcttgcaaattacctttatcggttctgtttcacccgccttgctcgccaaagtcggttggcacggtttaaacttccaatcaccctttgccgacttagccattttacttggaatccattggttagccgtcttactttacttagatgcgtttgtttcaccctttggaaccggcgtttcctttgtcgcttcatgtgcacggacattagcagcattaaagcagaacaaacacatgccaccgattgtcggccgcatgaacgaacaatataatattcctcgcattgcgatggtcattaacgccatcgtcagcatgctactcgtttcaatttttagaagttggggaacgttagccagcgtgatttcaaccgcaacgttgattgcctatttaaccggcccggtcaccgtcatgtcattacgtaaaatggcccctgatatgaaccgccctgttcagtcaccttggatgaaaatcatgtcgccattatcctttatccttgccagtttagcaacttactgggcaatgtggccaacaaccattaaggtgattggcgtcattatgcttggcttaccattttatttctactatgagtatcggattcactgggaaaatacttgggcccaattcaaaggaagcttatggttaattatctatctcgcattgctttcgctgatttcattcttgggcagtcgggaattcaacggaattaacctgattccttacccactcgatttcgtcttaattagcgcattagccctcatcttttactattggggaattatcagtcgcttctattcgaaatacttctcacgcgcaacacgaattaacgatgatgtgcaactttaagcatgactaaaaaggacgccaaacaacggttaaagttgtttggcgtccttttggtatctctagattgtttctgctaaaatgaatcgtaaagtacgttatctttttcgggaggcgctaaccaatgcaaaaattgaccgttcaatctactgatcgaatccatactttaaatgtcgtgacttggtttccaatccaaaaaccggtcgcagttgtccaaattctaactgggatggccgaatatatcgaacgttatgatgctttcgctcaattcttagcagatcgtgggattatcgtcatcggacacgatcatattgggcaaggccactccgttcagtccaacgatgagctcggttatttcgggccaaacgggctccagacgctagtcaacgattgtaccttaatcggtcgcattgtccacgaggaatacccagagctaccattatttgtgctcggacactcaatgggctcaatgctagcgacacaatatgttaagcaaactgaagtgccgattacttgagccatcttcatgggcgttatcgatgtacccttcattcttaaacccgccttaccaatcgttaaattaatcggcgccattgcagctaagcgccccggtactgtctggaataacttggcgtttggggtctatcctaaacgatttgatgctcaccgacctttttcatggttaagttacaatcaagcaaacgtggcggcctacgaacagcatccattgtgtggctacgtcttttcaaatagcggttttgcaatgctcttcaccctcactgagttaactcggcatgctgattggcaacttgccttacaatcccgcccagttctcgtaatgagtggcgccgacgatccagctggcggttatggtcgccgcgcgcggcatttaacgaaccaattcaaaaagcgcaccgttaacaacgcaacggtgcgcattctacctcatacagcgcatgaaattttattagaaacagatgctacccagcattaccaattcatctacgattggttgactaaagtaatttctggatctcctttaacacaccatagttctcattagtgtcggcacgataagtcgcatattggatcatatcgtcggcagcattccccatcaaataactatgttcaacggtttgcagcatttctttatcattataagtatccccgaaggccatcatttgcgccggcgtgatgttgaaataatccgccaaaaagcgcattgcatggcctttgtcgatgccttgattcataatatcgatccattcaacaccagcaaccgttactgaataagccggttcaaattcgggtgcgaaaacagcttcatactgtgcttgactatcttttcccgggaaataaatcgtaaacttgttggcttcaacactaacctgcgttaaatcaggtacatattcaatgttggcatagaattgccgcaaagtcgcgtcataatctcgatattgtgtttcaacgtacgccgcgtccatcccacaaatcacgccaatcccatctggcgtttgattaacgaattggaccatccgttggtaatcagctaacggcaataaacttttgaataaagtttcaccttgataaccaattgcacccccgttatcgctgacgtaaaccattgtgtcagcaagttcgggaaacatttgctttaacgtgtacattggtcgaccgctggcagctgcgaattgaacccctttagcatgtaattgctgaatggttggtataaagtttggtggcaactggccactctcagttaataaggtatgatccatatcggatgcgattaatttaattgtcatgcttagttctctcctatcccttagataccttaataatataccgtttatgccaattcatcgcaaccggttacattcaaaaataatcatactcgacatccatcgcttcgatcctgcccattaacacgcgctaaactaaataactcccccgttcagattccgatagtctctctaaaagatttgaatctcattgatattgaatgttcttttaaccgcgtcggacattagcgcaatttggttatcaatttcatcccaattggtagtaacaaatccagaatccaaactatcaatcatgtcattactgtttagtctaatctttaataataactgtttccccttggttgtaagtcgatagtatactttacgactatcaccaataaaactccccacattagcccgttcaattaatcctttttcacccaacgattggcattggcgggaaatagctggtcgagaaacgcccatacaagcagcaaggttgccgggcgtttcttctttttcacgatccattttttccatcaacaaatattgttcgagtgataagtcaacattttgcaaaactgtgacaaataattaatccaaaatattacgatatttaatgagcattaataattgattattcataataagcattactccttctatctattttgaggacctacaatatgcgaactagtaatcctgctctgctccacaggcattatattatataaattaattaaatgtaaatagctgaaattaacggtattgacaaaaaaatatttttaataagttttaaccctattaatatttttttattgaaattcgccaagtttgtgatgtttttatttattaaatgaccttttaatcgcgatgcagtttacagcttgtagctttcagccgtttttatagttcaaataataattatattgataagaaaatatttatttaaagctatcgttttctactaatggtttaattccttaaaattgatgcaactttttttgaatagtgctaataattgtcgctaatccattggctaaaccagtcataatgaggtaaataatcaataatcgatgtactttttgaacaaaaaaagaccgctatctaaagtgatagcgatccttttttaatccataatgcccgtggcaggattcgaacctgtacttggttacccaaacagcgacctgaacgctgcgcgtctgccaattccgccacacgggcgattgtgctacaagactattgtaccagtgttacagagccctgccaatacccatttattaatatttcgcttataataatagttgataagggagggattcagatgcaagtcatcacaaattcaaccgttcgtgcggtcctgcaggcacggcctgccatcagtcataaaggcgattttggccgcgtcttaatcattggtggtagtcagcaatacggcggtgctgcgattatgagtgcctctgcggctgtttatgctggtgctggattagtttccgttgctagtgacttaagtgttctcagcggactgcacgcgcgcttaccagaagccatgttcattgattatcaacaacccttcgtgcagtggtcgtctgcagtccaggctgctgatgtcgttgttgtcggacctggtcttggcattacttcgtttgccgttgaactgctgagaaaaatcttacaaaccatccaaccaacacaaacactgattatcgatggttcagcactatcaatcatcgcacatgaaaaactgacgatcccgaatacgcaactcattttaaccccgcatcaaatggaatgggcgcgcctcagcggtgttgcaatcgagcagcaaacgattgctgctaatcaagccgcactcgctgcttatccaaacgcgactttagtgcttaaaaaacatcacactgaggtctatcatcagcaacaggttcagcaactaaccatcggtgggccttccatggcaactggcggtagcggcgatacactgactggtattattgccgcattctgtggtcaatttggcacccactatcagacgatttgtgccgctgtttatacccacagtgcgattgctgatgaactcgccaaaacccaatacgtcacacttcctagccaagtgattcagaccttaccacactatatggctaaaatgattcatcaatcttaaaaaaacagcagtccttttgaaagggctgctgtttattaattcgctttaagtaatgcaagttctgcatctgtcaacgcacggtattggccacggtctaaatcatctggcaatgccagtggtcccatcttaagccgttctagcgtcaagacttccttgccgaccgcatgaaacatccgcttcacttgatggaatttaccttcatgaatctcaacggtaatctgactttcttgttgcgcctcatcaacactcagaatttcaagctgtgctggttgtgcagtaaaatcactcaacacgagccccgcttcaaaccgcgcttgatcctctgccgtgacaatcccggcaatcgtggcacgataaactttactgacatgttttttaggactcaacaaggcatggcttaaatcgccatcgttcgtcaacaacaataaaccagtcgtgtctttatccaatcgccccactggaaacagatcatcccgcaagtccgctggtgccaataaatcaagcactgttttctggggatcagtcgtcgccgaaatcacacccgccggtttgttcatcagccaataaaaataggtttgataacgcacgggttcgtcgtcaacatagacaacggtcgcctcgttcactttgaacttcgcatctttgaccacagtcccatcaacgcgcacgcgtcccgctttaaaaagtacctttaattctttgcgtgaagccacattcatatgacttaaaaagcgatcaattctcatttgattctcaactttcttctaaaccgatccaagttactcccaatgacatagtccgctaagcgcgatttaagcaccaatgcggcgtaaacagccacacctaggccaacgctaatcattaagactagaacgctctgaagacggctgtacgggttaaagacaaggtataaccccttgactgctcccgccgttaccaaatacatcaccaatgagaagcctaaaacgccgattaagcgccgaatggttttgcgtaatgcaaagtgataatagcgatgcagtgctgcaatcattaaaaccgaacttgtcgcaaaggctaagccggtcgatactagcgggccatagacacggaaaaaataaatcgctgggtactgcgccacaattttgacgatgaatccgatgaataagtaaaacaatgccaagcggttctgatagaggccttgtaagacagcgcctaaaaccgtaaagaggccgagcataatagaaatgtaagatgaaaattgtaagacactaatcccaagcgtatcatgcgcgtagaataacgtgtaaagcggaccggcaaccgccgccatcccaaatgccgctggaatcatcactaagttgaataattgcaaagtactgccgatttgatgttgcaattctttttgattgccccgcacatgcgcagctgacatcaatggaatcgccgtgaccgccatggcagcagcgagtgaaacggtgattgaaatcagtttattcgcattagctgcaaataaagcatacaagttatacaactgatgatcactggcaaccacgaaatcatgcatcatcggattaaacgtgtattggtcgatgatatagaccaagttgacacttgcgtcgattacgatgaatggaattgattggcgcacaatcccttttaacaagtcagtcgttgacacttctaattcgttgttactattggccactaactctgaaatgcgaccgcgttgtttcaaataatagaaaatcagtaataacaagccggcagcagccccaatgaatgcggcaaatgtcgcctgcgtcacagcatccacgtagctgcctttaaacacttgcataatcataaaagcggtcacggtcatgtacagcacgcgggctgcttgttcaataaattgcgaaatcgcagacggcgccatttcggcatagccttggaaaaagccccgcataatactgagcaatggaataatcaatagcggccagcttaatgaccggaagaccggtaccatccgcggatcacccgctgctagaacgggcgctaacgcaaagagtgcgagcgctgataaaacacccattgccaacattaaaatcagcgactttctgaaaagacgctgaccaatgccatactcattcatttcgttatagcgtgcaatttgtttcgatagcgcccctggaatcccagccgtcgagatcactaaaaagacactataaatttggtatccttttgcaaataatgtgttggcttgtaagaaattcgcgccaaaccagattggccacggaattacatagacggcgcccagaattcgcgagaaaatactcccagcggtcatccaagcggagccccgtaacatcttactttgtgaagatctatccgtcgcctttgtttcaggtgaattggtcatttcccataactcccttattaaacgtcaaaaagcatcttcctaccattttagaggattgccccaagccttgcaattcctttaacaaaactttatgaaaaagagtgcttctgatgacggttagcaactgagcattaatacaaaattcccaataatccaggttttaagattattgggaattttagattaagcggaagttgttgtcatcagaagcacgtttcaataagagtgctattagcgcttgcccagattttgagcactaacctaaaaacgggaattatggcgtactcggccatgattcccgttttgtagttaggcgcagaaatctagcgccaatagcacgtttcaaaaaaagagccccgccttcgcggagctctctgccatctcattatttagcttgtttactttgttgaatcaaataccacgtcaacagaatgctgacaaaaaccatgataccgccaaagattggtgtactgtctaagccccaagctgccgatgcttgcccgccaactaatgagcctatcgtaatcccgatattaaaggctgagatattcaaagccgaagccaatggaatatcatttggcgtgattttttcagccaactgcacaatgtataattggagccctggaacgttcatgaaggcgaaaaagcccatcaataaaacgttaattaaaccgaaccaatgggcatttaacgttaacatgaatagcaacaaggtcactaacaagccaacaaacattttcaatagcgccatcaacggttggtgatttgaccatttgccacccaacgtatttccaaaagccaccatcagaccataaataattaagatgatcacaacggcccttggtgaccaacccatttttgattctaaaatcggcgttacaggcgaagactggcgcaaaagcgaccgtcaagttaccaatgataaagacaaccataatccccaacaataaatttttccgcggccaatgacttgttaaaatcgccaaaatcggtgccccaatcgtaattcccaaagcatacatcgatacggttagtcctgcttgactcatcgtaatcccaaaatccttaatcatcaatggcattaagccgacactgatgaattctgtcgaaccaatcgcaaaagcactgattgccaatgctagtaatgtgaggttcgcccgttgtttactactcatactgccacactcctattagactttttttactgatgtactatattattcaataggagcgtgattttcacaatcacgcactttttagtcagtaggttactgaaaagtaataattgagtcttatcacaatgaaaaggtgaatcaaaattagaaatgaatgagaaaacatataacattggcgttgaagctacgatggaaattatcggcggtaaatggaaacccgttattctttgtcatttgcgcaaccaaccacggcgatcaagcgagctcttacaacgcatccctaagatttcgcaaaaggtactcaccgcacagttacgtgaactcgaaaacgatggcatcatcaatcgtaaaatttatcaagaaattccgccccgcgttgaatacagcctctctgaatacggtcagtcactcaataaaatcttaaatctcctctgtttatggggcgaagataacattgatcgccgccaaacagcgggtgaatcaatcactgttttacatcgcgatcaaatcaatccaatcgaatcgaataaaaaaaagacagccaactaggctgcctttttgcttgtcatgatttttgccgaccaaatttcacgaaataaataaccaccatgatcattaagaaaattaaaccaacaatgattgaaatccgcgtttccggattaatgaacatgaaaactagtatcacacacaacattgccaaagtgatgtaattggaatagggtgaccaaggcatcttaaatggatgttgtgccatcttgtcagcgtgttgctttctaaaggcaatttggctgatcaaaatgacgaaccatggcaccatccctggtaagacacttgaactataaacgagcacgaagacattgccagcttttggataaacaagtggtaaaatggcgtttaaaatcaccccgattaaaatccctaatgaaatcgccccgaccgcataaaatgggacaccgtggcggtttaatttcaagaatcgttttggtaactgcccattattggccaacgtgaacgtcattcgactggcactgtaaatccctgagttagcacccgataaggctgctgtaatcactacaaagttaatgattgatgctgcagcggtaatcccaattttagcaaaggtttgcacaaacggtgaaccgacctgactcaattcattccaaggataaatgctcaagattacgaaaatcgccccaatatagaaaatcaaaatccgcgcaacagtggattgaattgctttaaccaatgttgattgtggattttcagcctcgccagccgtaatcccaatcaattcaatcccttgatatgatgccaagacaattgccaaggcgaagatgaagcctttaaagccacccgtaaagaagccgtgcgtccacaaattactaatgccgactggatgcatatggtttccaatcccaaaaacaatgagtccaaggcctgccacgatcatcagaataatcgtgacgactttaatcaacgcaaaccagaattccaattcaccaaacatgctgactgaaattaagttggccgcacataagaacgtaatcgcgaccagtcccggtacccagcccggcaagttcggccaccagaattctaagtaaccgccgatggcaatcatttcactcatccccacgacaacgaattggaagacattgctccaagctgttaagtaaccaaaaattggatgcatatattccgttgcaaacttggcaaaggaccccgtatctggatcaacatacagcatttctccaagtgcacgcataatgagatacagcaataaaccagcaatcccatacgcaatcagcacagacggccccgtccatttaattgtcgtgttggcccccataaaaagcccaaccccaattgtcccgccaagtgcaatcatctgcatctgacgggcagttaaatttcgtttcatagtcctcaaacccctctattttagcatcatcattattggttaaccccagaatctaaatttacttatcatcgtataataaaaaacacccaaaagcaatagtcgctctcatctttttatcatcttaaaagcgctttagaatagcccttatattaattgaaggataattaggcccctaaatgttaattttaaataagaaaaagcagttactgcgagaaacagtaactgcttttttgaaacatgctttttggttgcaacaacttccgcttaatctaaaatttcaaataatcctaaaacctggattatttgaaattttttattaatgctcagttgctaaccgcaaccaaacgcactcttgtctgaaacgtgcttttcaagctaactttctgcgcttatcccagtgaatcaaacaatcgactacgtcgcttattcgcttccctctgataatgctcaaaagttgaccgagcttgaacccactctttttgaaacgcactctaattggcgacgatattgaccaatttatttggaatggcaatcactttgcgcaccgtcttgtcagcaatgaattcagctactttttcatttgccttagccatcgcttctaattcttccttcggtgtgtctttagctactgttactttggcctttaacttaccgttaacttggaagatcacttctacttcgttagcgaccaatgctgctgggtcaaatgttggccagtccacgtaactgattgagtcatcatggccaagcattgcccataattcttccatcatgtgtggtgcaattggcgctaataacttcacaaagccttcagcgtattcacgtggtaatgtgtcaactttataagcatcattgatgaagaccatcaattgtgaaatggccacgttaaagtgcatgctttcgaagtcttctgtcactttcttaacagtttcgttgtaactcttcttcaattgttcatcattttcagcgacaatcttgcttgaaagttggtcgttttcgtcggtatcttcttctgtgtatagacgccatacccggtccaagaatttacgcgcgccggctaagcccttttcactccatgaaatggaagcatctaatgggcccatgaacatttcgtataaacgtaatgtatcagcgccaaagcgatcgacaacatcatcagggttaacaacgttcccttttgatttcgacattttttcgtggttatcgcctaaaatcataccttggttatataggtgttggaatggttccttcgttggcacgaccccgatatcatacaagaacttgtgccagaaacgaacatataataaatgaagcacagcatgttccgcaccaccgatgtacatatcaactggtaaccagtctttcaacttatcaaagtcagccaatttatcagggttcttaggatcgatataacgaaggtaataccatgagctaccagcccattgtggcattgtattcgtttcacgacggcctttgcgcccattttcgtcggttatgtttaaccagtccgttaagttcgcaagtggactttcaccagtccctgaaggcttgatatcacttgttaatggtaattcaagtggtaattgatcttctggcaccactgatgttgtgccatcttcccaatgaataattggaatcggttcaccccagtagcgttgacgtgagaataaccagtcacgtaacttgtagctcacttgttcatgaccagcattatgcgttactaaccaatcaatcatcttgtcgattgctgcctgtttgtctaaaccatcaaggaaatctgaattaatcatcacaccaggttctgtgtgaacagcttcttcaggattaccaccagccacaactggtttcaatggtaaaccaaatttcttcgcaaattcccaatcacgagggtcatgtgcagggacagccatcacagcacctgtcccgtatgaggctagaacgtaatctgaaatccagattggtaaccgttcgccattgactggattaattgcgtaagcacctgtaaaggcccctgttttatctttcgccaaatcagtccgttcaagatcactcttgtgttcgatttcttttaaataagcatcaacagctgctttttgttcaggcgttgtgatatcggccactaatttatgttctggggccatcacgatatagctgacaccaaacattgtgtcggcacgcgtggtgaagacatcaatctgagcgtcgtggttttcaacagcaaatgatacttcagcgccttttgagcggccaatccagttgcgttgcatatctttgacactttcaggccaatcaactaggtctaagtcgtcgattaaacgatcagcataagccgtaatcttcaacatccattgacgcattggtttccggtaaacaggatagccaccgcgttctgttttgccgtcaatgacttcttcgtttgcgacaacggtccctaaatcagggctccagttaacagccacttcagcttcataagctaagcccttttcgtacattttttcaaaaatccattgggtccatttgtagaaatcaggatccgttgtattcacttcacgatcccaatcgtatgagaagcctaatgaattgatttggcgtttgaacgtattaatattggtttgcgtgaaatcagcaggattgttcccagtatccaacgcatattgttcagcaggtaagccgaatgcatcccaacccattgggtgcaacacgttgaagccttgcatccgtttcatccgggccaagatatcagttgccgtataaccttcaggatggccaacgtgtaagccttgacctgacggatatgggaacatatctaatgcatagaaatttttcttatttttatcttctgttgttttgaacgatttgtgtgattgccagtaagcttgccacttttgttcaactgcgcgatgatcgtaagtcatatcaaacactcctttttttaacgtgctttcaaaagcatggacacttttgacacactcttttttaattcacttaacgccaataaaaaagtcctatggtataaataccataggacgaattgaccgcgatgccacctaagttctgtccaatctatattggacaactctctggccttaacgcggcagacgtttctatctactatcagttcaatagaaaactcaaaggcgagttcgttatgttaaacgacgtgttcacactaaccacacgctctctaaacgcttaacgataactactaatccttctcaacgttaaataattgttcttagcataccaaactcttacttcaatttcaagacttggccgactaagattaaatcagaatgtaaattgttcgctgattttaattgtgcgatactggtattatttttttgtgcgattgaccaaagactatcgcctgatttaaccgtataagtcttcccagaattcgtgttaggcgtcgttggcgttgtagcgccagccattaattttaagacttgacctgggtagataaagttattcttaatattattagccttgattaattgcgccatcgaaataccgttacggctagcaattccccagacagaatcgccgaccttaaccgtataggtcttcccagaagcttgccctggatttgtactatttgtattattgttgtttgaattaccagttgttgcaccttggctaaccactaatttttgaccaggatagataaagttgttccggatattattccatttaaccaagtcagccattgagatgccgtaacggtttgaaattgcccagacagaatcccctgatttaaccgtatacgtcttgtttgaagtctgattaccgttattgctgtttgaattattgttatttgtattgccagttgcggtttttgaaactgttagaacatcgccagggtgaatcatattattcttgatgttattccaactaattaaatcgttcattgaaatcccatatttgttggcaatcgcccaaacagagtcgccggctttaacggtatacttatcaccattagctggtgttgttggattcgttggtgttgtagggtctgttgggtttgtcgtcccaccattgttgttgccagctgcactacttgaaacaatcaagacttggcctgggtgaatcatattgttcttgatgttattccagctaatcaagtcattcattgaaatcccataccgattagcaatcccccaaacagaatcgccggctctaacggtgtattttgtcccattttcaggtgtcgttggagtcgttggcgtggttggagtcgttgttcccccattattgttaccagtattggtccctggcgtgtcatattgcgttaaattgtattgttgaatcaaacggttcaaacttgacgcataattggttgctgttgcataacgtccttgtaagtattgtgtggcttgttgatagctacttgtatggctcttaaatgccccttgataataaggcgttgcaccaaatgaagtattccgtagcacatgcacataatcttgtaacgattggtagtatgaaggatattttctaaatgcagcttggatctgatacatgttcccatgaccatcatcttcccaagtccacatataaacagaactaccattgtaagtcccttttaccccaaacaagttataattaggggcagaacctaaaccactgctcccaaatcctgattctaatgatgcttgggcaatcataacagaggcgtacaaatcgttatcacccgctaattgttgagctgaactagcaattgaattgatgaaattttgtgcgcttgaattagctgttgccataacaacgccagcggttgcgatattggcactcgtactttgcactccagaaattggttgcgcttgagatggtgccggttgtggcgtagccacctttgtcgcttcattttcagtcaattgaggttttacaacaggttgttgtgttgattgggattcagttgtcgttgtgcttgaactagttgttgatgatgttgcactacttgctgtattagctgttgtagcttggtcatcattgtttgcactatttaacacatcttcagtggctgctttggcccgattcgaaaaactaggtgcaattgctgaacccatcaagacggttgcccctgcaaaagtcgtcacattacgaactttcttaattctaatttcccgcttctgcttatgtaagcttaccttttgagctgcaattcgctgttttctagtctctttcaattctaacgcctccgaatttccattattattgtctgtggcacaattaacttgagcttcacctgaactttattataatattaataaatggggaaaacaatcctatcacgcaactacttttattagttgtcttatgcttaataattattgtatcatttaataatcttctttgtctttaattacagcttattttgaaaggatttcttaaaaatgaccaaacgattttcggctagtttattcattcttggcacaatcagttttctaatcattttaatcagcgttgtgcaccatgccacttgggttatacattttgatacccttatcagaactggcatccggtcgctttcctccccattgatggatactgtaagcattgcgattacgtcgatcggcaatccctatagtataatgactttgaccatcattgtaacgcttggtttgctgggctttaaacagtggtcagcagctagctttttagtcattaacatggtccttttttcaacgcttaaccactttattaagatgagcgtccaacgaccacggcccccatttcaccatcttgtctacgcaggcggctacagcttccctagcggtcatgcttcgggggcgcttctttttttcggaactttaagcatcctagtttactacttaattcgtcaacgcgtttggcgaaaaatagcgattggcacctgtttaatattggcactatgcatcggccttagtcggatttacgtacttgttcattatccgagtgatgtcttagctggctttttattagcaacggcgtgtctcggcggttcatggtactgttttattcattttaaattattgcatctgaaggagtcctaacacatgatacttgatcatcccactaaatttgcacattttctattagaccaggcaattcggcccggcgatgtcgtaattgatgccaccgtggggcatggcgatgataccttatttttagcagaacgcgttgctgattttggtcaggtttacggtttcgaaattcaaaaagaagccatcgaaacctgcgcggatcgtcttacaaaagcaaaccaagcgaaccaggttactttgcttaatcaaggacacgagcggattatcactgccttaccacccgagttaaaagtgcaagccgccatttttagcttaggcgcactcagtcctgattcttttgaacacgtgacattgcctaacacgacaatctctgcctatcatcaaattctctcacggcttaatcgcggtggcttactggtattcgttgttgatcctcggttcaatgaaactcaagaagaaatcgactatctaatcgccgacttaagtcgcctagaaccaaccaattaccaagtaacccactacaaggcaatcaacgccgaccaaggacaagtcctagcgatagaaaaaatttagagtgcgtcgtaaggcgaatatccgctgaggattaacacagcgtcgtgaatgattacaacgtaatcgtttgcggctcagggttaaccggaagcggatgacttacaaagcacgtttagagtgtgatcccagtcgggtatctcttgaggattagcctagactggcgaatgattgctgaaagcaatcgtttgcggctcagggttaaccggaggcggatgccttacagagcacgtttagagtgcgtcgtcagtcgattatctcctattcaaacattaaaaaaaggcccagtcatcattgatgactgggccttttactatcttataatgtcccgaccacttttgtaccgtgtgcttcggaaatttgtaaacgttctgttaacacgtcgacattgtcggctgtaatgccaccgccaggtaaaatcacaatccgcccatcagcagcttggattaacgtttttaaacgggcttcgtcgatgggcgcgtctaacggccccccatgcgttaaaatccgtttaacatcatgatcaatcagccattccattgctgcagcttgttgatcagccgcaatttcatcgaaagccatatggaaaacaacttgcatcccattggcagcaccaatcaacatttccatcgcttcttcgtcgatttgattgtcaggtgttaggcaaccaaggacgatgccgtcagcgcctaattcttgcgctgaaaagatatcagcttccataatttttaattcttgatcgttataaacaaagttgccgccacgcggacgaatcatgaccatcactggtacatcgtgttcatgcgcataacgcactgattcagccatcacaccccggctaaccgttgtgcctccgacagccaagttgtcgttcaactcaattcgtttagcaccattgcggattgctgccggaattttagtgaaattttcaacacaaacttctttgattaacatggatgaaccctccaaattttaatttaatcctttatgcaaatagcattgcacctaagacaagtaggcccaagataatccggtaccaaccgaagaccttgaaatcatgtttcttgatgtaatccatcaagaatttgattgaaataattgaaacgatgaatgaaaccaacatcccgactaataaaatgattgattgatcgcccgtaaacgtattgccttggtacaagaatttaccaatcttcaagattgccacgccgaccatcgttggaatcgccatgaagaacgagaattccgcacccacaaaccgtgatgtccctaaaataattgcccctaaaatcgtagcgcctgaacgggatgtcccaggaataattgataaggcttggaaacagccaatccaaaaggccgtcaaccaaggtaacgtatttaaatcagcaaatttcggtgtggtatgcttgttgcgattttcgatgacgatgaacaaaaccccgtataaaatcaacatgctggccacaatccagtttttcatcagatgttcatccatccagtcattcaatgggaatccaataatgactgatggaatcaccgccacaattaccttaaaccataacgtccacgtttgtttttgttcgagctggttcttacgtggtgagaaaggattcaatttatggaagtatagaatcacaaccgccataatcgctccaaattgaatcacataattaaacatatcgatgaatgcttttgattcatcaagtttcaaaacactaccgaccaacactaaatggccggttgaactaattggtagccattctgtaaaaccttcgacaatccctaaaatgattgtcttaatcatatttaaagttaacacaatactaatccctccgtaatccataatcgtttattagtatactcattctaaagttagattgcgactcaaattgaaagcttaatcaaattttattcaattcgcccgcaggaaaagccaaatgacgttgatccatcactgcttgaaaatcggctggtagttcgctttgaaccgtgacataccgttcttcaaatggatgatagaacgttaactcgcgacagtgcaatgcttgacgcggtaataaatcatcggccacaccgtataaattatcaccaattaagggatgccccagtgatgcaaaatgaacccgaatctgatgtgtccgacctgttagtaacttcaacttaactaacgtggcatcggtgccatgggcttcttgccaatattccgttaatgagcgtttgccaccaaccccaacgacccgccgcatgtaaaaatcatccgaccgtttgattggccgatcaatccacgcatgttgcggataatctaaccgcatatcaccactggcaatcgcaacatatgttttttgcaattctttagattggagttgcttatccaacaaactatgcgcgaagccgtgcttggtgaacatcatcaaaccacttgtatcgcgatcgaggcgcgttactacgtgcactgcctggctctcagcattttggtcaatcaagtattgtttgacgaaattggccattgtgttgtgcggatggttcggtgccggtaacgacgccacaaacgccggtttatcgaccactaaaaaatggtcgtcttcaaaaaccactttcaagtcccctttaactgggatgacgtgttcgacggccacttccggtgcgaggtaaacagtcaccacatcgttttgaaccagttgggcattggtatgtgcctcctggccgttgacgaggattgtgccacctgcaaatttaattttagttaactgactgcgagaaagcttatgccgccgtaaaaaattccgcaacacacagccttctgcatcttgatattgccattcaaatttcatgttttgacccaataaatgcatcttcgacacggttccagaaatgggtgtgtcgataacgtgcaaactgtattctttcctttgcaattttaaattgcatcgaggcaattggtcgatccttaaatgtgaattgatcaattgtcacaacgtaatcacttgtcttagaaggcttcaggagcaaccattcatccgatggtaacacgattggtgccgatagtgttcgatatacgcgattattaatcgacgcaatttcggtcatctgcatcgcgtctaagcgtggatgtaaaaccgcgccaccaatcgacttactataagctgtcgacccagttggtgtggaaatacagagcccatcgcccctaaaactttcaaaaaaattctctttaatgtaaacgtccgtccgcaaagtcgctgcataccgacgtaacgtcacttcattgagcgccaaactgcgactgatttcgtgcgtatccgcatattcgattttaacttctaataacggatagctaatactctgcccgagatcttcttgcaaggcgacgactagatcatcgacttcaaaatcgcgccagtcagtgtaaaaccctaaatgtcctgtgtgcacgccaataaaccggatgtgcgctaaatcgtgggcgtaccgatgaaaggcagataaaagcgtcccatctccaccaactgaaatgaccacatcgggcgtttgatcatcaatgacaaaccccgtattgatcaatttttgcgttaagcgattggcaacttgaacggaagaactaccgtcattgctaaataccgttactttcaatctggcgtctctccttcagaatcattttcagttgccttttcaagtgcgttttgccattttccatatgagaagagttgttgtgcttcttgaatttcttcacgaatttcagacatttctttatctaacataaaggatgcttcggccgctcttttaagccgcgccttcagcgtttcaggaaattccccttgatatttataatttaatgaatgttcaatggttgcccaaaagttcatcgacattgttcgaatctgaatctcggccaaaatcaatttttcaccactgattagttggactggatattcaattacaatatgatatgaccggtaaccacttggtttaacatttgaaacgtaatcccgttcttcaacaattttcatatcagtccgttggtgcaaaaggcccacaatttcatggatatcttccacaaactgacacataatccgcaaaccagcgatatcttgcatatcttgttcgagtaaatcttctgtaatgtagcggcgttgcatcttttctttgatactatcgattggtttaacgcgcccagttacaaattcgatgggtgcatgttcattattttgttggtattgcttgcgcatcccacgtaatttaatttttaattcgctaacggcctgttcataaggcattaaaaacttcttccaattttcgaccattataaacccctcattcactctgtcacatacagcactattttaacatagattagaattgaataaataataatcgtctgaaatacaaatttcattacaagtctgcttttttgtgctaggataataacattgcttttttaaaaaggagctcaaccgatgtcacaaacgattgaacgcgaatttaagacgatgctaacggcggcgcaattctcgcaactaaaagcggactatccatttgcagcgccgtttgtgcaaaccaattattacttcgaactgcctaaccagggattggctaaacgtcactgggggttgcgtattcgactctttgacacctatgccgaacagacgctaaaggtgccaaccgtagaaaatgctcatagtctgattgaaatcactgatcgtctaacacttgagcaggctactcacttaattgagcaccaaaccgtattatcgtctggtcagatcgctgtctattttgcagcacaagccgtgattatcaaagaattgttcatctggggacaggcaacaacgcaccgccagaccgcgtctttagttgctggcctgttaacgcttgatgttacccaataccctgacgaaacccaggattatgaagtcgaaattgaagtcaccaacgtccaagaaggggcaacttggtttaaatcatttgtcacccgctatcaattaagtgaacaaataccacccaataaaattatgcgcgcccttatccatcaagcttaaactctgtcaagctaacttattgcataattttaaaattttgttagagtagacagtacaagcgcgtcgagcagtatatacaatatagaaagtttggaggaaccaacttgttagaagtgtttttatttatcaacccaatcgggcaactttgtttacgttccgaagaggcacttttaaagattatcggcgaaaccgatgcaaatattcattttaaatttattccagtcttaaacttaaaaaacgtcgagcattacatgcagtttcagcaacaaaatagtcatgatttaaacttacgtaatcacgttttcagcaccatttatgaagcagtactcgcttataaggcagcaacgttccaggggggcaagaagagccaatcatttttaatgcaactgcaacaagcattccgtgaaccagatatggaacttaacaacgaattagtccttacaattgctaaacgcgtaggacttgataccgaaatgttacttgaagattggcacagtccacttactaaacaggcatttgattcagatcaacaattatcttgtgagatgaacattcagatgaccccttcagcagtagtcttcaactattcaaaaggtgaaagcgaatcaggcttattgattgaaaattgcgattcctatgaactcttgaaacaagcctgttgtgctgaaacaacacctgaacagactttccaagcacttcaaaaacaaaaaagcaccctctcacgggttgctttgcatgttatttcttaatcttagaaccggtggtcaaccgacccccggttcttttttaatacttgtttcaaagctatttgcccccattgtgcaaataaggattgctttagtagtggttgttggagtaagggcgttaccgctaaaaaaagatcaattggttgggcactcaaccaccacgttacccgactttcaaactgactgagctgataaatgggtggtacattacgtgtgcagtaacaccagtccggaacggcttgcaagcgttcatggtgggcataacaatccgcctgtaacgcaacataatgtgcgtcttgcagccctaatcgacggtcaataatttgttgctgcataggctgtgacttgcccttataatgattggctggcagtcttgtttgtgctacaagcaagcgcacaaacgccttagttgtcaatcgcagggtttgccaagcataaccagcaaaatcacgggcgacaatatggtgatataacacccattgcccccactttggcaaataacttaccacataaaagccccactgccgccgatagttgataaaccccaactgttgctggcttaaataatggttagtaaaacaataccgttcaccaaccacccataatacaggtaatcggcgctgctgatagccgattgttcgttggtttaacttatctggcgtcaatgggctgcattggtattcaataattaatggttgctgattccgcgttaaccatacatcagcgcgctgtgtctcgccgacaggtacttcaaaggtagcatgccagcccaacgcatgtgctaattcagcaatcgcctgttttcccgccagatgggctggactctcaccaccaccagatacacgttctgcgatatgtgcgaaatatggtgctttatgcaccccacgatgcaactgaaccagttgttgacaatgtggacagaaataccgcgctacttgctgttgtttggctgcttgatcggcgcgaattaagcacccgttagtggtctgtgcaactttcattatttatcacccccaccgaaaatacgcaaaaaaataacgggttctcctaaatttaggaaaacccgttatttttaatgtttgaagtagtagcgtgttaactcaagcgcactattatccatgactttttcaccgaattcacttaaaaaagctgctgtgtattctgacttctgcccgtattcattagcgaccgctaaatcatcccgtgcaaacgcttcggtcgtattctccataaaaataataatctgtgcatagtactgatgtttgtaaagaaataggttcgacacaccactttcgatgtgtagctgttgtgccaaagcaatccaatcgtcaaatgacttaaacgataacacaatctgtttcattggattgtccgcttgattcatataagcggtcatttcatcctcttcctcagtcgcatcatcttggaccgtatctcgtttcaacagttgttctttaatgtattcagtaataccgtctttgccttgcaccatttctgattgacctttaccaccgtcaaagtttggcatattcttactaatcagtaattctaacccttgatcgttaggcaacacttggaacgttactgcatcgttgttcgcaaatgtgtgttcactgtccacttcttccagaattgaatagaagaaccgctcaatctttttatgattgctcaacaaatcaagtccagtaatcccgcgttcttctaaatcatcattttctaatagaacccgaattgtgttctcgtcgattttttccattctcatgggacaacgcccctttctaacgcgcttcttatagcgtcgtaattcactttctttgacctaccataccagtatctggcgtaacattcaagtatctacatcacagcaattaattttttaacccatcaaaaaagtcgaggctgttaacagccccgactctcctctagaatcctgctagtaattgtgcttgttgtaattccaatgcccgtacttcacgtggtaagaaacgacgaatttcatcttcgttataaccaacctgaagtcgtttttcatccaaaataattggacgacgtaatagccctgggttcttttgaactaaatctaataattcgttgattgataagtcatcaattttaatgtttaattcttggaaaaccttagaacgcgttgagataatttcttccgtgccatcttcggtcatgcgtaagattgttttaatttcatttttattgagaggctccgaaaagatattgcgttcttggtatggaatattgtgttcctctaaccacgcccgggctttacgacaagatgtacaacttggtgatgtatataacgtaaccatatgtctctctcctttattaacatgacaccttacttaacaataagacaatcattttctctcttacaaattttattatacgcgagtcagcactagaaaactaccctaaaattaaatttattaattattttttaataattaataaatagacatttgaacataaaacgtctaattaaaacggtttattgttaagttttcccactcaccattaatttttatgtttttacatttatatttatcattcaaaaaaaattatagtagtttctactttctaatgaaaattcacttattttttgtaagttccatcaacgccgcctatattacatgctccgacatcaattgtcaaatcctgttgggcaactatcacgggtacgtccccaacagtcgcttgtgcttgtgcctgtagcgtttctgccgaaaccccttgtggtaaatgcgttaatagaattttagctgcgccactttcttgtgccaagttaccggattgcgttgttgtcatatgcgccattttaccagtgcgatcttcaagaaaattcgtatcagtcatcagtaaatctgcagactgacaaaaagcagctaattctgggaaatacgccgtatctgcagtaaagaccaagacctgccccgtcgtttgttcttcaattcgaacagcgaatgctgggacaggatgcactgtccgtttgaaagttactttcaacggccccagggtcagctctgtgtcttcttgataaccaaagccctgcgtcacacccggttgtgtcaaactgccaaagtggagtggatcttgcagatgcccgtaaataggtaaaatgggttcctttttggttccttgatgcagttgccaataatattgtaaaacccccacatcagcaatgtgatcgtgatgatagtgcgtgagaaggaccacatctagttgcaatgggtcaaattgtttctcaagcgctaataaagcgccactcccacaatctagcaataaatgatacgccccacttgttaataaataactactagtcccaacaccggcgtatggatatccaccgtaataacctaagactgttaattgcatttttaaatgaccacctttctaatttctatagtagcgcattccgggtatcgcgcgcactatatttactaactaaataaaaaaagaccgccacccaaatggatgacggccctaatgctattgaatgacttggactttcttagctttaacttcttgatagaaaatcgtaacgctcataattaagtatggatagaaccacaagagacctagtccagcagtcatatagacgaccagttcccatccaataaatgataaagtaagcccgagtaatttcagccagttcccttttaaaatcacccatgaaaggctaaagattaatttgagtggtgcttgtggtaaatcaaacttcaacagtactaaaatctgataatacgttaaaatcacgggttgcaacagtgacaaaaccaacatcaccgtcacaaacaataagacagtttcagaaattgtcccctgctggctaatgtttagcaaataaggcgcaacggaatctaatccattaaaagtgaattgaaatacacgatcccaaccgagtaaccgataaaacggcgccaacccaattaatagtaagatccagtttaacacttgttgaacaagattcaataccacaagatgggtatacaacggttgccggaataacaataaggtatcccggtaatagctgggcttattctggctaactttataaacacctaagaaaacagcatttaaaaagataaagtataagaaataattggcaaaggtgttgagcatttgataaccaaatgaactggcgccaaacacgccttcaatcattgagtcgactactatctcaactaacaaccaaagcgcgactaaagcggccattttctgccagtttccttttaataattgacgcgcttttgcgcggtacatagctaattgcaaaaacttttcctccgagtttagtagaacacatcactattgagcggtgcattcacaattcgattgtagatattggccgtaattagatagaaaacaaagtaaatgatgataaacaggccgcaaacgatataggctaattgtaacccaggattatctaaaaacaaacccaataaccgaattgcaaagaaggcgtgcatcgatcccaaaataattggcagtaaaaagagcatcaaaatttggaaataaatcgtgcgcttaatctcaccgtcactcatcccaatttttttcaatgttttatactgcaaaatctcttcttgtgcttctgacaattgtttcaacatgatgatactaccagtggctaacatgaagattaacccaataaaaatggcgacatacatataaaatccgaagtttgcgttagcaatatctcggttaggtttttttaaaagcacagaatagcggcttaactcttctagccgttgatcagtggttttaatttcataatgggtttgcccggcttttttgtgcgtcattaaataatcccattgtttgggcttttgagatagacggaataaatcgcgcattaatcgtttttgcttttgttgggcagcggagagctgaactgcatagatttgatcaactgaagttgcttggacttgttgatattcagcatcattggccacaatcacgtttaagttaccatcaaagaagacatcagaaccgtttggaaatagcttacgaatgtgtacaatccgaaaatctgaaagcccagactgttttaattgcaacgggattccagctcttttcggtggcaaacctacacctgctctgcgaggcatcttcagcattgttaatggcaagttaatgatggtcaccacagtatttttcttcaatttagttgctggtaacttaaattgttgcgccattacttggttgtattgggataatggcatgacaacagctgctccatccattttgatgccttcccgatttaacggtgaattgaccttaaatcgagcatccaccaatttaaacgaagacattgtttgactaaccggctgaacatgatattgcgttaaaattttgtcgaccgctgctttttgactttgtgtataaaccaaatccaccggaatgttctgccgtaatgtatcttgaccgtgcgtataaatcatcgccgcacttccgattgcggtaatagtaactgcacttaaaatcgtaatcatccacaacatctttgcattctttttaaaacgaaaactcaaattcgtaacgtttaacaaatgtatcccacgataataaagccgtttccagtgccgttctaactgtagccaaatttgcgtataggcctgaaaaaaagccagtgtgccaaaaatttcaagtaataaaatggttagtaaataaaccaaatcaatcccaaaaccatagcgccgctctaagctcggcatcaaaaccagtgtttggtctgccaaataatagccgctgataatcaatacaggtgcaataatcccccataaataagtcagccagttcggtcggcgcactttccgactgactgcagatggttgcagcaatgtcactaattgataccgataaatcatcgtactgtttaaaaaaccagttaataggaacaacccgccaaaggtgaatgtcgtttgttcaatggcccgccatgatattaaaaacggcatggcaaccgcaatccccatcatgcgtaataataacatcgcgaataatttcgaaaaaagaatcccgaataacaacccgataatcagggcaatcacaccgataatcaaactttcaaagaagaagagtaagttaatctgaaatttagtcaccccgatgacacttaaaacaccaatctcccgccgacgccttttaatgaaaaataaattagcatatgccaagaaaaaagcggcaaacagcaaaataattaaacctgctacctggatcatccggccaaaagctaaagattcaccagccatcttgaggtgcctaaagattggcgcagtttgaatcgacgtaaagcagaaataaaccacaatcgcggcaacacaggcaatcacataagccgcatagtcgcgcgcatgattaatcgcatttctaacggttaggtgtaacagcattgaaacggcctcctccacctatggttgcttgcatatcaataatttgattgaagaattgttgccgatcaccactgcgaacgatttccgagaataattgaccatctttaatgaaaagaattcgccgacagtaactagctgtaaaggcatcatgcgtgaccaataaaattgtcgtcttttcctgacgattaatcacggttaaatattgtaaaagctccgtagctgattttgaatctaaacttccagttggttcgtcggccaataacaaagtgggattggtaatcattgcgcgcccacatgccactcgttggcgctgtccaattgaaacttcatccggataacgatccaacaaactactaatgcccaagactcggctaactttatccaaccgtttttcaatcactggcacacttaacttatcaagcgctaatggcagtaacatgttttcgcgaaccgtcagtgaatctagtaagttaaaatcttgaaaaataaagcccaaatcttgccgcctaaaattagcaagcttagcttcccgcatccgactcacaacttgatctttaattaacacttgaccatgcgtcggccgatcaatggtcgcaatcatatttaataaggtcgttttcccagcgcctgaagggcccataataccgacaaactcccacggttcaatatcaaatgaaatattattaagcgcattgaccagactaaaccgatgcccgtagactttcgaaacttgttggactgatacgactgccattttttcacatcccttaactaattggtattcattttagcagagttgaccgcaaaagcccattttataactacgaccttagttggttgtcttttctagtgaaagtggttagtattagtctatctatgtatgaggagaattcattatgtttgaaattatgattgttgaagacgatccaacgattgccaacttaatcgctgagaacttaaataagtggcaattacacgcaaatattacgaccgatttcgataccattttcgaccaatttttaaccaataaaccccatctgattttactcgatatcaacctgcccgtttatgacgggttctactggtgtcgcaaaattcgtgaagtatctaaagtccccataattttcatttctagtcgcagtaccaacatggacatggtgatgtcgatgaacatgggcggcgatgacttcgtcaataaacctttttcgatggaagttttaattgccaaaattaacgccctcttacgacggacttacaactacgtcgaccaaaatgccgatatcatcgaacataacggcctaatgattaacctccaaagcggcggagctcaggtgggtgagactaccattgatctttccaaaaacgaatataagctcctccaatttctgatgcgtcaacacggccagattgtcagtcgcgaaaagttattgcgtgccctctgggacgatgaacggtttgtcgacgacaacacactaaccgttaacatcaatcggcttcgcaaaaaaattgaaagtgctggtttagaagactacattcagacgaaaattggccaaggctatatcatcccctaaggagttattatgacgtttaaaaaattcttacgtgatcatttatttcatatcgcttttttcttcagcggtatgattgttctggatatcgtcctatggctcgaccctagtatgcgctttgctaaggcgacacttttatacctcgatttattgctggcgctttttttctgcgcctttttggttggcttatacgtctaccatctcaagtggtaccgcacaatccaaacacgcttagatgctaaagaagatagcctcaactggccacttacaggcgctacctcggctgaaaaacaattcattcaacactacgtgaatcaactgctagcctatcatcaacaaagcatcgaccgactaatctcagcgcaacaagatcaaaagaatttcattgatggctgggtgcacgaaagcaaggtccccctggcagctactcaattgctcattgaatccatcgaagaccagattccagaagacaaattcaatcaattaaccgatgaactgattcaaattgaacactacgttgaacaagtgctctactactcgcgtctcgatagtttttctaaggattacttggtgcaggaatacgatttaaaacctttagtcaaccaaatcatccgccaaaatcgcaattattttattcaaaaacacatccaatttaaactgcttggtgccgatcaaaccgtcttaaccgacgctaaatggctggcttttattttgaatcaaatcatttccaatgcgttaaagtatacccccgacggcgcacaaattacggtacaaattgaacgtgacgaacaaggcgtttggttaagtgtcatcgatacagggattgggattccggctgaagacctaccccggatttttgataaagggttcaccggtcaaaatgggcgctattctaaccaacgttcaaccggtttagggctctactttgcacgtgccttaagtgaaaagctcggtcacgaactcaccgttagctcccaacaaggcagtggttccacttttaaattactctttccttttttaagttactacaacacggatgacgatgacggcttattcggcaaaacccatcctgcagacaaatgaagcggagcttcaaaatgcgtaaaacacttttaatcactacacttttaacaataacactcctagcaggttgccaagctaaaaaaccggcttcatcaaccacatcccgcgcgcagccaactacgacgacctacgccaaccgaacaacaactaaaaaagccctcgcggccgattcacagacttggttgtttaacaaacaactcctttctaagcaaactaaaaacggtctttctgatgacatcaccgtttcaaatattgctcaaatgaccactcctaaaagttggctgacctctaaaggcaccttcacaagtcagccgattaattatcaacaaatttcgtttaaaaaatggcaacaagatagccgcagtcatctgatgaagagctatcaaaagacactccatctgatgactgtggcacaagtcaacgctgcattacacaaattgggggctgactttaagattaaacacctctcagatctcgtctttcttgagactaagactgggaaaaatacaattgaccaaggattcgttgccaaaggaaatcatctatacgcaattacagctcattacagagatctacaagaacccaccaattttgaccgcggacagttattcgtcagtcaaaaagcaaccgccaaaacaaccgccagtcctgttgccctcgaccaactcaatggcacttggattgcggccgcaacaacgacgagtgctaatgacaccggaaaactgatggtcaaagatggcttcatgtaccaaaaatgttatgatagtattgaacgctctgccattcaagatcttgccaaatacactttagtaacgctcaatcaaaacacaatctatgctgctcaaaaaagggatgcagcacaagctggttatcaattaacccctaagtcgattgctagtggtgatagtatcggttatctctacctcttcatgaatgatcatgaactgctacgcatcggtgctggtcaagtaacaagctatcaaaagacggattcactagtagctgctgccgatttatcacagactgatcaaaccatttttgagcaacttgatcaacaaaagcctggtgaatcagcttcaaccattacggtcaaagcaggtcccgctgttgtcgggatgagtgatagtatcaactatctaaccgatgcaaccgctggccagatttcgaacaatatcgtcattggtaacgttcaaaacgggcacgtcaccattgcaagtgagtcaactcattaattataggcacaaaaaaaaggtccgacattcatgtcggacctttttttgtgcttaagccgcttgatcgcgggctgcttcttcttttaaagccatgtctgtggcgatcttgatgaatggtaggtaaatgagcactgaaacaagtaagttcactgctgctaataccccaccttgccaactaaccgttgcgatgaccccaccgataattggtggtgttacccaaggtggtataaccgttgcagcgggcactaacccggtgctagttgcaaagtatgcaattgtaacgatcaccattggtgtggcaatatatgggatgaataaaattgggttcaatacgattgcaagccaaatgttaatggttcgttaatattgaagactccaggagcggcactcaaattcccaacgattgaatattgtttattctttcgacccactaaccagattgcaatgattaagcctaaagtagcaccagtcccacctaagttaacagatgaatcaaagaatggtttgttaacaatatatggtgctgctttaccagctttaatcgcatttaagttagctgtaattgcaggtgcattgattgtttgcatgaatggttcgatcatgttagcaccgtgtaacccgaagaaccataagaatggtgtgatgaatgctaataataatgctgaaggatagctgtttgcaagtccttggaatggttcttggacggctttgtagaatgatgtcacaatattttcaacaccaaagcctaatagaattgttgcaaataatgagaagactgcgatggtaatcattgatggcaataatgccgcgaatgattgtgaaactgcaggtggtaccccatcaggcatcttaatgactaagtgtttattacccaataaacgtctgagaatttctgttgaaatcatcgcaacgattaaagcaacgaacaagcccattgagtccatccctgcaagaccgccagcagcaaagaatgaccctaatgctgttacgccggctgctagtggattgatattatatgacttacctaaattgtaagcaactaggaagacgataaacacagaaagaatcgcaaatatcccgctccaagcattgcccccgaatttagtccagatataagccttttcagcgcccttaccaactgtctttgagaacacactatccatgaaattggtatatgccggaattggtaaattattaatcaaggttgcaaaagcccccaagatcatcaatggcatcgttgttacgaaggcgtcacgaatggtaaatgtcgttgattcccaacttttgccacaactggtaaaaagcgtttctccatgaaactgataaatgaatccattaacctcactccttttcctgaatcataattaaaaaataattgctattacaagtattatgttacagaaagcgttgtcaaacgataaccccgttcattacctatgaatgtccagtttttcacaaaaactaaaaaaagcgccaacccattctaatcatggattgacgctcttttttatccgtgttaggtatataccaatgacggaaaatgaaaattaaatttttaataactttattttacatattactttcaatgaacaagctttgcccatataacgggctttttagcggctaatgattttttgacatcgataatccgttgattggcactccctctgaactgcaatgtcagatccatttggtccttcatgaagcgcccatcaactaagatatcaatcttagacagcaactcgagtttatcatctgattcttgcatcagttcttcccacgtatatcccgtccatgaccagacgtcctttgtctgcccataagtggcgcgaattcggtctactagcgataaacaagtcttggtattcaagaacggttcgccacctaataacgtcagtccttggacataagattgccctaaatcagcaataatttggtcttctaattcagttgtataagggcggccatagcgaaaattctgcgccactcgattgtaacaaccggggcaagcaaacatgcaaccactcacatataggctacagcgcaccccttcgccatcaacaaagttaaacggtttataatctgcaatataatcctggcttagtgtttcagaaagccattctttgggcgccggattcttcgggccttgttgttttactgccatcttcaaaaactccttcaaatcccgtattcacaattactgccgtgcaacgttgttattatcgttgccaatggtaatatgcatgtgcttaactcgactggcgatttccttatgccgaccatgcaccattggacgttgttgtggattacctagataaccacaagtccgcttaacgacgtcacatgtagcagcatccgtgttcccacattgtgggcattggaacccgcgttctgtcggcttaaagtcccctttaaacccacatttgaagcattgatcaattggcgtattcgtgcctaagtagccgacacgatcgtaagcataatcccagacagcttctaaagcctttggattttgacgcagatttgggtattcacagtaatgaatgaacccaccagaacagtattttggataatctttttcaaaatctaatttttcaaatggggttggtgccttacgcacatcgtagtggaaactatttgtgtagtattctttgtctgtaatattttcgacaatgccaaatttttgcgtatctttttgacagaacgtatttgttaaactttctgctggtgtgctgtaaacagagaagtgatagccgtattccttttcccaatcaacgcagtgattatagaggtctttaacgacgtctaccgtaaaggcttttgccttggcatccttttcccagtctggcccaaagaaggctgtaccgacttcataaaggccaatatagcccaatgaaacagttgcgcgtgaatttttaaagacttcatcaacactatcggttttcttcaaacgcttgccaaaggcaccatattcataaagaatcggcgcattttctggcttcgcttctttagcgcgttccactttaaagaccagggcttccttgcagacttgcaaccgttgttctagaatttcccagaacttagcttggttgccatcagcttcaagtgcaatccgtggtaaattgattgtcaccacgccgagattcatccggccactattcacttcttcaccatgttcgtttttccagccttgtaagaagcttcgacaacccattggtgctttgaaagaacccgttaattccaccaacttgtcatacattaaaacatcgggatacatccgttttgtggcacattcaacagctaattgtttgatgtcataatttggatcagttggatttaagtttaagccgcgttttactgcaaaaactaatttagggaagatggcagtccgtttttctttacctaatccttcaattcgaattgaaagaattgctttttgaatcgcacgttcaatccagttactgcctaatccaaaaccaagcgttgtaaatggtgtttggccttgggatgaatataaagtattgatttcatattccaacgcttgcatggcgtcataaatatctttttcagtcttggtttgcgcataatccttttgttttgcttcgccatcaatccaattcttggcatctgctaaatgtttggcataattcttttcggcaaatggtgccaataattcatccacccgatcagcggaacaaccaccatattgactagaagcaacgttagcaataatttgtgacatttgtgccgtagcagtttgaatcgaatgtggcgcttcaacttcggcattcccaatcttaaagccatgattcaacatttctttaaaatcgattaaacaacaattggtcattggactatatggttggtaatccaaatcgtgccaatgaatctcgccttttaaatgggcgtttgccactttatcaggcaacatcttaagccccatcgctttagcaactgtccctgccgttaggtcccgctgtgtattaaaaacatgactatctttattcgcattttcattgaccacagtttggtcttttttcaataatttttgaatggtaaagttgatatcagttgccttattccgggcaaagtcccgttgcgtccggtagttaatgtattcttgggcaatatcatattggtgatgttctaaaagtttatgttccacaatattttgcagttcatagattttaacatctttatcaaatcggctgccgacttcactcacaacatctagtgcgactgtgtttaacacttgatagtctaatggctctaattccgtcttcacatttttagcggctttaataattgcttgttcgattttatccgcagaaaaaggcatgattcgcccatctcttttaatcactttaatttgcaagtctgcttctgaagcaattttcatatccatcttagcaccagtctccttttgaatcagtaaccccatcatagcggattaaaaattcggattcaacctatatatagtagataaaccaacaaaaagacgcactacaactatatgttgtgtgcgtctaattgtgtgcgatattttctttcgcccgtccttatcgaaatctacttcatactgcttaaaaaaagattgacatcatgcatctcgttttaatttcaaagtcattgcattaatagccacaacaattgttgagagtgacattaagattgcaccaactgctggacttaatactaacccaattccggcaaatagccccccagctaatggaatcgctaaaatattataaccagcgccccaccagagattttgcgtcattttgcggttagttgcgtgcgataaattcaagaaatgcataatatcgtttggattactcttcacgaggatcacatctgctgaatcgattgcaacatccgtcccagcaccaattgcgattccgatatcagcccgcgttaaacctggtgcatcattaacaccatccccaaccatcaggacgacttcgcctttagcttggtaatctttgacgattgcttctttatcttctggtttcaagttcgcttgaaccgtcataccgcccaattgtgcagccactttttcggcaacttgttgattatcaccggttaacatgaccggttggatatgccgtttctttaatgcttggatgaaagctggcgcttctggtttaatctgatcaccttgtgcgactagtcctaaaaccgtttgatcttgtaatagataactgatggaattccctttttctgctaaagtttggaaaagagcttgatcaaatttaatatgctgggcttgtaaataagttgccgtcactatttgataactttgccctgcaaccgttccagacaaaccgacgccttgaatcgtttggacattgtctgcctgtaaatcaggaatagtttgtgcttggttatactctagaatcccagtggccaatggatgacttgaatggcgttctaacgcaccaaagagttgcatgagtcgttgttcatcaagtgctgtatcgaaaacttcgacagcattcactttgaatgcgccttgtgtcaaagtccccgtcttatccatcaaaacaacggtaaccttatctgacaattcgattgcttcacggttacgaatgagcaagccgtttgtagccgcaatcgctgtacttctggcaaccaccaatggaatggccaatccaagtgcatgcggacaagcaataataaagacggttaccatccgttcaaaagccgtattcagatcggccaagaacacccaactaatgaaggcgataatcccagcaaccaatgcagcatagaaaagatacttcgcaactttatctgctaacccttcaacttttgatttttcttgttgtgcttgtttaattaatttcatgacttgcgctaagtaaccactttcgccagtcccggtcacttgcacggttaacgtcccatttccgttgactgtcccaccgattacttgatcgccttcagccttcgcaacagcctttgattcacctgtcactaaggattcattgacttggctttgaccggcgataattaacccatccgcgggtactttttcaccagctgcgactaatacagtttgtccttttttcaagtcctttaaatcaaccgcgtgttgatgccctgcttgatcaattacttgtgcttggccgggtaacaaagcagccattttttctaaagcactccctgcactcattaccgcattcatttcaatccagtgtcccaacaacataataacgattaacgttgcaagctcccagaaaaagtccatcacgtggccttgtgggttcaagaaatggttcgcaacaaaggcgtataaactatatagataagaaacactgatccccattgcaattaaggtcatcatcgctgggctcttagcagataattctccttgagcgccctttaaaaacggtgccccaccgtaaaagaagagaaatgttgctaaaatcaatactagccaatctgaacctgggaaagtcgtttgaaaaggtaactgcatgcccataaatggtgagagaattagaattggtaccgttgcaattaatgaaatccagaatttttgtttcagatttcccatgtgcatcatatgaccaccatgcatcatcatatcgccgtcgcccatgtcatggtgcatcccatgcatatcgtgattcatatgccccatatcatgatccatcatctcatggtcatgatgcatgtcgtgcatgctgtgatccatttggtgctcgtgatgcatctctttcatatcgtgtccttcatgttcatggtgcatttcatcgtgtttcattttacttcctcctctatgcaatcacaattggctggtaaacaatcacattcaatcattgttggtgcactaggtaatttagccgctaacaccgtttgtaacgtctgaatatcattttgactgagcgttgtttgctcgattaaagtggctaatgtgcagccttttttcatcccacataattggttaaacagcgactgcgtggcatggttcatcgcttcatcttctgcgatattggccgtatatataaatcggcgtccttctttagtggcaattagatagtctttttttaccaaccgacctagcaaagtcttaacagtcgacgcttgccaatcacgcttttgctgaacgagttcaattaaatgactgctgttgacttgcccaagtgaccaaaccatccgcataatttcccattccgcatccgtaataacccctattttttcagtcattcgcggttttctccctttcgtttacatttgtaatcattagttacagtttacatttgtaatcgataactgtcaatcttttttgctcatccaaattttacgcacaaaaaaagaccgccacagtgggcggtcttttaccatttaattaaagattttgcataaaatcttcaactaatttttggttttcttcattacttatattcacattaacagcggtttcaactaaatcagttaattgagttgtatctaaacgtttcatcaagctccgaacccgaaggaccgaagttgcgctcattgaaaattcgtctaagcccattccaacaaggagtggtgccatgactgaatcgccagcggcttccccacacattccagtccacttaccttctttatgagaagcgtcaataacgttcttaattaaacgtaagattgctggattgtatggttgataaaggtatgatacacgttcattcatccgatcagcagccattgtgtattgaatcaagtcgtttgttccgatactaaagaagtcaacttccttagcgaattgatttgccaagacggcgctggctggaatttcaaccatcatcccaacttgtaaatcatcagaaacagtttgaccatcagcaattaatttagctttttcttcttcaagaatgccttttgcttgacggaattctgcgacagttgcgatcattgggaacatgatacgtaacttaccgtagtttgaagcacggagtaaagcacgcaattgtgttctgaaaatatcatcacgatctaaactaatccgcacagcacggtagcctaagaatggattcatttcttcgggtaatggcaagtaaggtaatttcttatccccaccaatgtccattgtccgcacaacaactggtttaccagccataccttccaaaacagtcttataagcttcgaactgatcatcttcactaggtaattcagatgagtccatgtataagaattctgtccggtataagccgattgcttcagcaccgttatcgataacaccatctaaatctttaggtgtcccgatatttgcagcaactgtgaatgtttttccgtcttttgtaacggatttttcattctttaacttttcccattctgctttttgatcagcgaaagcttgcgccttcttatcgtattcagcaatgtctgcatctgtaggattgataataacatccccgttaatcccgtcgacaattaattgttcgccggctttaacagaagttgtgatattttcagtcccaacaattgcaggaatttctaaagaacgagccataatagcagagtgagaagtccgaccaccaatatcagtcacaaaagccttaacgaatttaccgtttaattgggctgtgtcacttggtgtcaagtcatgagcaatcacaattacttcttcatcaattaacgctgggttagggagtgttacccctaataaatgactgagaactcgcttagtaacatccttgatgtcagcagcgcgttcttgcatgtatgcgttatcagtcatagcctcaaaagtggccacgaataaatccgcgatctctttgagcgcttgctcagcattaaccttgtcatcattgattttaccttcgatagcgccggtaaattctgggtctgctaaaatcatcatgtgggcatcaaaaacttgtgcttcttcttcccctaatgatccagcagcaatcttccgaatggtctctagatcactcgtggaagcttgtaaggcattatgcaaacgattaatctctttttctgaatctgaaatagttgatttcgaaaatgacaaatcgggttgcactaacatataggctttcgccgtagcgataccatcactggcagcaatccctcttagttttgtcattattcagataaaccttcctttttcattgtttcttcaattgcgttgattgcgtctgcttcgtcagcaccttcagctgagatagtaacgtcagcaccttggccaacaccgagtgacataacacccatgattgacttcaagtttacagatttacctttgtattctaagttaacatctgagttaaatttgcttgctgtttgtactaataatgtagctggacgtgcgtggatacctgtgtctgctactacgtgaaaatcgcgtttttccatattaatcgatccccttttatctaattatagatttagtttttaacgaaatgagtggtcactagtagtggctacccttccgatatttaagattaccattttttttaaaatactacaatagtttcgctaacaaaattagtagccgtctacactataccgctttcagacttgcggtagattaccgcaccatttcgttgtgcttcgcccacaatttcttttcgatggtcatagttgacccatactttctgaaaatctaaaaattcggactgagcaacctcaatctcagtttgttcgttatttattaaggcatccatctctgctaaaaaatcacgcatctgccattctgcctcctttgcaattcttttatcgtggcttgaaaaattcgttttcattccatctgcgaaataaaacgatgacctcatactaccgcataccgcccatacctgacaagaaacttttattttcgagttgcctgacttgcaactttttttagagatgattataatttggataaaggtcaaagatagtcaagaacactttgacgattctattattaatgaaaggttgtgacagattaatgctttgtcaaaactgccagaagaatcctgcaacgattcatctctatacaagcaccaatggtcaacgacaagaaatcgatctttgtcaaaactgttaccaactcttgaaacaacaaaacagtaatggccaagcaccacaagggcaatatgcagatccatttggctttggaagcctggatagtttcttccgagcaatgggcgcaactcccgatgatcaatcacaagcaaaccaagggccacaaacccaaagtggcggccaaggtggcggcaacaacgggcaaaacggcgaaagtctgctcagtcaatacggtgtaaacctaaccaacttagctaaagctggccaaattgatccagtgatcggtcgcgatgctgaaatcgatcgtgttattgaaattctaaaccgtcggacaaaaaacaatcccgtattaattggtgaagctggggtcggtaaaaccgccgttgtcgaaggcttagctcaaaaaattgccgacgatgacgttcctgccaaacttaaggataaacaagtcattcgcttagatgttgtttcacttgttcaagggaccggtattcgtggtcaattcgaacaacggatgcaacaactgatgactgaattgaagcagaataagcaatacattctcttcattgatgaaattcatgaaattgtgggcgccggtaatgccgaaggtggcatggacgccggtaacgtgttaaaacccgccctcgcccgtggtgaactccaactagtaggggccacaacgaataatgaattccgacaaattgaaaaagacgcggccctcgcccgtcgtctccaacccgtttcagtcaatgaaccttctgttgacgaaacagtccaaattctaaaaggactccaagataaatacgaagcctatcaccaagtccactacacagacgaggcacttaaggcggctgcaaccctttctaatcgttatatccaggatcgtttcttaccagataaggccatcgacttacttgatgaaaccggctctaagaagaacttgacgattaccgttgtcgatccaaaagaaatcgaaaagaaattacaaaatgcggaagctgaaaagcaaagtgcgttaaaggacgaggattacgaaaaggccgcttattaccgcgatcaagtcacaaaattgaccaagatgcgcgaaacaagtgccattgaccaatctgaaatgccaaccgtcaccgacaaagatatggaaaaaatcgttgaagaaaaaacccacattccagttggtgagttaaaggcacaagaacaagcacagttgaagaaccttgctgaaaatcttgaagcgcacgtaattggtcaagattcagcagtcgataaggttgcccgttccattcgtcgcaaccgaattggtttcaacaaatccggtcgaccaatcggttctttcctattcgttggaccaaccggggtcgggaaaactgaattagcaaaacaaatcgccaaagaacttttcggtagcacagatgctatgattcgttttgatatgagcgaatatatggagaaattcagtgtgtcaaaattgattggatcacctcctggctatgttggctatgaagaagcgggtcaattaaccgaacaagttcggcgcaacccatacagcttgatcttactggatgaagttgaaaaagcacatccagacgtcatgcatatgttcctacaaatcttagacgatggtcgtctgacggattcacaaggacggacggtcagcttcaaagacaccatcatcatcatgacttcaaatgccggccaaactgatgccgaagccaatgttggtttcggggcaaccctttctggtcagacacactcgattttaaaccaactacaaaactactttaaacctgaatttttaaaccggtttgatgatatcatcgagttccaaccattaagcaaagaaaatctcttgaagattgtcagtctgatgctcgatcaaacaaatgcgatgattgctgaccaagggttaaacattgccgtaactgaaccagtcaaatcacggcttgtcgatcttggttacaatccagagatgggtgcgcgtccattacgacgtgttattcaagaacaaattgaagatcgcgtggctgactattatctcgatcacccagaacataaacaattgacggctcggttggtggaagatcagattcaaatcaccgatgctaaagattcacaggtcacagattaaaaggctttattatctcaagttaaaacgaattacgtgccaaatgaagcgttttcagttatactagtggtaagacttaaacatccagggagtgatttagatgcgcttaatcaatgtaaccaattcttataagcgacttgtttcacaacaactcgctgcaacagccgcaacctacgttaaggtttattcacttggtaaaacaacggttcttgactcgcgttcatcgaaggaacgtgagctccttttaaaaaatgatcatcgacatgtccaacaagccgagatcgattttgtattgaaggaactcgccggtttagattccacagatggccttgaagtcttgaatgatggtccattagtcgaaattacaattccaacaccttcaaaaacagtgagttaatcattcgaaccgccccgacatttcattttgttggggcggttttttacataggcaaaataatggcaattgaataggtcgtatcgtataataactttcaacctaatttaggaggattaatgacgcgatgaagacttttcaaaaagagcaccaaattatttgccggttagaagtgggcgacgaaatcctaacagaacttaaatatttggccgcaaccttccccaaccaactgggaactatcacggggattggtgcctgtgatgaagttaccgtcagcgtttattcaccagaaacggatcaatatattgccacttccagtcaagagcaagtagaactgctggcccttagtgggaatgtcgaaaatgcaaatggcacgattgatgtccatctacatgcaagctttgcccgtttagatacaagcgtttttggtgggcatctagaacgcgccgtcatttcacgtacaggagaattaatcgtttccttaattcccgtttccatcggccgcgtcacccatactgcaactaaattacaagtattagatatttaaacgattagaatcactgctatttttgcaggggttcttttttatgcccacttgacgcgttaattatcaaccacactttttgtaatttatgatagactagtagtaataagtaatgcgctacaaggagtccgtatgaatctgattaacctgcttcaatcgttattgaaatggcgcccgaaaaaagcagctcctctaccgaacagtcatgtacgccaaactgtctctgagcaagagcccatccgtcaagcgcctcaatcgtcacagaaacagccggtcgttcccgttagtcaggacgcaacgccactgctggctacgatgtccacacaaccgcgccatagcacagttaccattcactacctcgatcatcatcgggtccctttacgaccaacgatgaccctgacaggtgaagtgggtaccgtgctcaatttgccatggctaaaattttccggttattacttggcagctattaccaatttaaaacaacagtttcctgaagaaaacaccactatctggcttttttataaaccgcaactcgcagcaccagtaatggtgttacaccagaatttagaaggtggcttgttgattaagccccaatttttatcaggtgctttgaacgaacactatcaagccaatccactagaaggtggtgctaacttcgtgcaccacacctcagctaatcagactggtcgctttacaactaagacacagtttgtccattttaaatatgatccgctgaatttaaaacacagcgatgcacctgaacagcccttcatcgaacttcttgagccaacggatacctatcagcaaccaagtgaagaagcgctgactgctgctcgcttgccaaagcacgcggtttggaagatttatagctgtgcaactgctccatctggcaaacaatggttcaatcttggcagttcttggattacccctacgcgttatcaattacatgccactaatcctaaaggcagtgatgaatcataccaagtaccaaagttcacctaccattacgcagttatcgaaacaacccctctaaacctcagtgcaagtctgaacaacaataccgtaacattttggcaagcaccgtatgaccaacccacaacatatcagatagtgcctaaaacacgggtagtcgttaagcaagtcgttgtactcgataatcaaagtcgctggtgtcaacttaaaacaggtcagtggttaatggaaggcctcctaacttttgactaaatacccccctaaaaaaaataagccgccgattcagacaacagttagtgtgtctgaatcggcggcttatttttgtttgactctttatattatagttttgcggttaattcaacgtctggatacttatcttggaaccaacgttctgcaaattgattttcaaataagaacaatggttcgtcatgaatatcttttaccaatagatttcgtgaggatgacatccgttcatccaattgttctggattgatccaccgcgcagttcttgaaccgattggatccatcaatacttcagaattatattcgtgttgcatccgatattggaacacttcaaattgtaattgaccaacggcgcctaagatataatcgccagttgtgtaagtcttatacaactgaatcgccccttcttgaaccaactgttgaatccctttatggaaggacttttgtttcatcacgttcttggcagtgacgcgcatgaataattcaggggtaaattgagggagtttctcaaatgaaacagcctctttacccgtgtgaatcgtatccccaatttggaaattcccggtatcatataatccaacaatatcgccagcaacagcgcttgtcacttgttcccgtgtgtcggccatgaattcagttgaattgttcaaccgcatcttcttgcctgttcgcgtcaatgtgacatcaattccgcgttggaattcacccgaacaaattcgtacgaacgcaatccggtcacgatgagctggattcatattggcttgaatcttgaagatgaaccctgagaaatcaggagaggttggttcaaccaacgtttcttcttgtgttttgtgtgcttctggggcaggcgctaagttaacgaatgattctaagaacgtcttaaccccaaagttagtcaaagcagagccaaagaagattggtgtttgttcacccgttgcaatcttatcagcatcataggcattgcctgcttcaccgatcaattcgatatcatcaagggcttgtgtgtaaacagaatcttctttcaatggattatcaccggcaatccgacctgcttcatcaagggccaaataagggttggcttcgtcttctggtcgataaagttcgattcgacggttggcgatatcataaaggccacggaggtcttttcccatcccgattggccagttcatagcacagccttcgatgtccaatagttcttccaattcagcaatcaaatcaagtggttcacgaccatcgcgatccaacttattcatgaaggtgaaaatcggaatcccccgcattttgcagactttgaataatttcttggtctgtggttcaatccctttagcagaatcaatgaccatgaccgccgcatcaacagccatcaaagtccgatacgtatcttctgagaaatcttcatgtcccggtgtatccaaaatattaatccgcttgtcgtcataatcaaattgcatcacagaactggtaacggaaatcccacgttgcttttcaatttccatccaatcggacttggcaaattggccactctttttccctttaactgttccggcttgacgaatcacgcccccgaaaagtaagagttgttccgtaatcgttgttttaccagcatccggatgagaaataattgcaaaagtacgacgacgatcaaccgccgtttttaattcagtaggtgtcattataaaatcctttccgttattccaatataatgcgcttgggacaaagaattgcgcaaccattgcgtcaccctttgtcccattgattgtgctcatttaatttagtcgacttcttctggtgcatcggtctctggttctggtaacgttaattgtaaatcaatcaaccgtgaaccggaaaccgaccccgtcgttaagctcatgccacctggcagctcaattgtttccggatgaccactgactggaatggcaccaatttcagtaatcacgaacccggcaattgtatccacatcagtgacttgaatatctgtattgaaggcactgttaaattcattgattggcatacttcccataacggtgtaatgctgcgcatcaattttttggtacaattcttcagctttatcagattcatcatcgatttcaccaacaatttcttccaataaatcttcaatcgtggctaagccaacaacgccaccgtattcatccaacagaattgccatttgttgctgtgtgcgtttcatttcaaataataaatcatcaattgtaatcgtttcgggaacaaaaagaggttctttcattaccgcttcgatttgcatggcctgaaaacctttttggcgtgcttctttcaagagattcttgatatgcacgacccccaccacttgatccttatcatcccgataaaccggaatgcgggagaatggttgggctaagatggcatcgatgttttgatcgttgtctgcacaaatatcaatcataaatgcatcagtccgcggtaccatgacttcgcgcgccatcttcttattgagggtaataatcccctctaacatttcgtattcatcggtttccagaacaccggcactcttcccagattcaatcatgtggaccatttcttctcgggtgagcttcggttctgtttctgaaaaatcaattggtgtcaacttcattaagagcgaggtcgacattgatagcaaccacacgaatggtcgcagtaagataccgacgatccgcacgggttgcaccgttattttagcaattgcttctgcacgatgcagtgcaacttgcttaggatataattccccaaaaaccagggatacataggataagacaatcgtcacaattaatacggccgcttcctttgtccaagccgcatttcctaaaaggggtgctaatctacccgcaatggttgtggcagcactcgctgaagataagaagcccgcaaacgtaatcgcaacttgaattgttgctaaaaactgattggaatgacctaagacttgaactaatactcgcgccttcttgtcacctttattggcttgctcctccatcttcacacgacttagtgacacaagtgcaatttctgccgcagcaaaaaaagcattcactaaggtcaaaattaatatcaacagtaactgtccccacaccgaacttccagggtcaggattcatcgtcacatccactacctttcattatctaaataagtacatttagccgaatatggcctaccttgcagtatagcatagtcaaaaatggaaattcaacctgcatcttttaaaggtcggtcccttttttagctttagtccgtaacgcttgaatatcatataaataagtaatcactgtcttggtaacagcataaaacggaatcgctaaaatcatgcctaaaatcccataaatattcccagcaaccaataagataatgatgatggttagcggatgaatatctaatgaacggccaatcacgttaggataaatcaagttcccatcgatttgttgaacaacaatgacgacaacaatcaccatgattgttttgggaatcgaaattgataaactgataatcaacgcgggcgcaatcccaatataaggccctaagtatggaattacgttagaaacgccagcaataaatcctaacaaataagcgtatggcatcccgataatgagataaccgataaatgtaaagacgccaacgaataaacactctagagcttgaccaccgatataagctgaaatcgtcgcccccattttccgaagcaagtccgccacttggtcgttataacgatcaggtaacatcttttgaatattaggcactaaacggtgtccgtcttttaacatatagaacaacataattggaatcgtgaagacactaactgtaacgctcgtaatcgcaccaatcatactaccaaaactagatgtgaaactcttcataactttttcagcaatcttcgatggttttaaatctaactgattgacgtatttattgaagtcaatgtttttcaagcgcggattgctagataaatcatccgctactttttgcagtcgatgagcaaaatctggtaggttcgtcacaagttgtgtgatttgtttaatcaagttaggaatcacagtggctacaatgaaaattaaaccgccaaaaaagacgatgaagataatcgtaatcgcccagttgcgtgatattttgagtttacctaacagattgattagcgggttaaacaggtaaaataatagtcccgcgccaataattggcccaaataaagttgaaataaaggtgccaattggatcaaataagaaactaattttggtgcaaacaaagattaacacagccaaaatcaaaagctcaattgaccaaaataatagttttgattggcgtaaacgatcaaacatgcagtatccctccagtgtgcctgtgtcacacaaaacgcattttatgctatcatagtgtaacgattattgttattgtaccaaattttatagtgatacacattgattattccttttgaagaggtggttttttaatgttagtgaaacaaactcgtgatttaaaaagtacggtttatcaagatagtttggcaattcggcaagccgtattcgttgttgaacaacacgtgcctgctgaacttgagattgatgaattcgaagaccaagcgatttattttgtcggctacgttgctgatcaagccgttgtgacgttgcggctcatcgaagcggactcagattatcatgttcaacgtgtcgcagttagccgttcagcacggcatcatggttatggtcaagaactgatgcgtgccgctgaagtttttgctcgggaatcaggcaaagcaacgctcactttaaatgctcaattaagtgcagtaccgttctatacgcagcttaattttcaagcaaccgccaaaccacagttcctagatgccgggattatgcatcaagaaatggttaaaaaattaactgactaattgtcatttcaccactaaatgacttataatgaacacagcttaataacagaaaggacgttaccatgcctaagcaaaaatcacttcttgtccacttatttttcttcattatcccttatctactcgtcattacgattgccgcaacggcttacgacagtcttgtgattcacagtgccacttgggatcgcaccttgttcagtgctctaatcagcagcaccctaatgttatttattaaagttccaatcgaacgaccgttgacgattatggctgacttagcccctaaccaaacacttaaaatggtaacaagtttcttcctagtagaacgttcacttggtattaagattgctaacttcatttttgatggcatccttttctgccttgcaacttatctattacgccacttcttgccactcaacatcattgctggtagtttactcggctggtgcgtcttcgcgcttttgctatccatcagcatcggtgctggcatcggctttaaaacattaacgattcaacaagatacttcagtcgaaaacgattaacccatacaaaaaagccccagtcaatcaatgactggggcttttttgcttgagactaaatagtgttctaacgacggtgcgccaattcttgataccggttataccaaatatcaatgtattccttcgaaaagggccctttgccattgttgatccaatcaaccaaaaccttaacgttggcttttaaaatccgatcagtttcggcggaataatgccattgcgcactgtgcgcttcatattcatcgacatctagaagccgtttttcgccattggggaaaaccttcacatctaaatcataatcgatatacttaagcgcctcttgatccatgacatgcggcgatgccaaattacaataataagaaacgccgccctcacgaatcattgccaccacgttaaaccaatacttcttatggaaataaataagtgccggctcccgcgtgacccactttctgccgtctgactctgtaactaaggtatgatcgttacaaccaatgactgcgttctcgctggttttcaaaaccatcgtatcgcgccaagtgcggtgtaaactcccatcgtgtttataactttgaatcgctatatagtcgccttctttgggaatactcatcgacatacccagctttccaaggttattattcataatcatctatcattatagcaaagactcgcaaatttacctaaaactttctaccattaattggttgccaaacgtgccgctaacttcttttgcacagtcggtaatgcaacgtcagctaattgtgcctcggtataccattggcctgggaaaaaggcgaggtcggcatctgctgcaagttgtgcttctaaaagggtaatcgtccatttaagatgtgtaaaaacgtgcaccacgggttttaaacctgattcatgtaattgctgcaattctagtgcaaaagcctctttaaaataagcttcgatacgagctagttgttcttccggtgtcaataattcatcgtcagttacttgcaagtcttccgcagcgactagtggataagtggacaggttcgctaataaaccggtactcggtcgtttttgaaataataagcccttttgcgagcgaatcacaactgcaaacatcgcaaccggtttttgttttgctttcttcgtcttgactggataatccaataaggtgccatcttgataactccggaaaaacggtgctaacgccgtctcaccaaccgttggattctttgccgtacaaacttgcgagccaaaatccatcacggcttggttaaagtcacctggacgatctttgggaatcagcggtaaaatcgcatcgtaaaaaatgtggcggttctttgggttggcaatatcagcatcgattttcaataaccgactgaacacccgaaaagcattgccatcgattgccgggacgacttcgccaaaacaaatactggcgatagcgcccgctgtgtacggtccaatcccggctaacttttctaattcagccgcggttgttggccactgaccattgtaatcgtcgacgacttggcgcgctgctttttgtaagttacgcgcgcgcgaataataaccaagtccctcccacgttttcattaataagtcctctggagcggccgctaagtctgccaccgttggaaaagtcgccaaaaaccgttcatagtacggaatcactgtttgaacctgcgtttgctggagcatgatttcagatagccagacacgatagggctcttgattctggcgccaaggcaagtcccggcgattttcatcataccaagtcataaacgcggtttgaaacgcgtcccgttcactcggtgtcatctgatagttcttgttcgtcgatgaagtggttgattgcatcaatattaaatcctttccgatacaacgcttgttgcatcttcatccggcgttctcgtggttcgagtaatcgataacggcgccatttttttgcaccaagttcagcaagcgcgtcagcttcactatcttcatcggcttcaagggccaacgcttcaataattaaactaaggctgtcaccgccaaaccctttttgcattaaaccttgtttgactttttgctgctgttcaaagaatgaactatgacggtatttcttcgccaacttcttagcagctgctaacccaaccgcaacttgatcatccactgaataatgactaagtgcttgatcgatatgggcagcactaacgcctttttggattaatttctggcggaccactttggggcccttatccgcggtattaatcacagtacgaacgtagctatcggcgtaatcctgatcgtcgatataatgtaactcgcttaattttgccaagctagtctggatcccttctggagtgatctcgtgttcgcgtaaatattgcgttagttccttttccgtccgcaattggtgactcagataattgagcgccaattgatacgctttggcattatcatcgtctttttgaatgtcgcgttgcagttgactatcaatctctaaatccttcgctaaacggtatttaatcaagacactctcggtcacgccaaaagcgaattgctcatcgataaaaatattataacggcctgattttttctgtgccgttattttggtaatcttcggcatgttattctcccttgttacgtgttgctttgatgtttaaatagactttaaatccaatgaccacgacggcgagcactaaagtcccgatgatcagtggtaagctcttgtgttggaaggcataaacgccaattccgagtacaatcagcatggcgattaaaaattgatttcgttcccaaaaattcatgtggcttcgctccttactttaacttcctgtagcatagcataaatggcgcacccggacaaaagtcactgcttaattcccactattgaagcgatttttcagtgctaagtctgttatactgaatgcaatgagaaaaacgagtatcattattttatattaataggagcggattaaatgccagaacaaacaaaccaagtcgaagtcggccaacgttttccattgacgattaaacgaatcggcatcaatggtgaagggattggctattacaaacgcaaaattgtctttattccaggcgcacttcctgaagaagtggttgtcgcagaagtcaccaacgttgcccctcgtttcattgaagcaaaagtccacaaacttcgccaagcttcaccacaacgggttacccctaaggatgccacttacggccaagtcggtgggattgagcttgaacacttaagctatcctggccaacttgccttcaaaaaagacgtcgtcgtccaagcgcttgaaaaattcaaaccacaaggctacgccaaatacaatattaccgatacagtcggaatggaaaacccctggcattatcgcaacaaagcacaattccaagtccgcgaaatcgacggtcatttagcagctggcttatacgctccaagtagccatactttaattgatttgcctgaattcgcaacccaaaccgatttaacaatgaaaatcatccgaaccgtcttgaaattagtcgaatcactcggaattcccgtctttgatgaaactaagaatgccgggattttaaaaacattggtcgttcgcgaatctttttcaaccggtgaagcgcaactgaccttcattaccaactcccctaaactaccgcaaaagcacgccttgattacagccatccaagctgaattgcccgaagtggtttcaatcatgcaaaatatcaacaaagggaaaaacgtgctcgtttggggcgaccaaacgattcatctggctggtcaagaaacgattatggaaactttaaacggcgttcacttcgaattgactgcccgcgcctttttccaattgaacccagttcaaacggctaagatgtataacttagttcaagatgcacttgatctcacacctgaagatcgcctcgtcgatgcttattgtggggtgggtacaattggcttgagtcttgccaatcaagtcgcagaagtacgcggcatggacacgattgccgattcaattgaagcggctaaacacaacgcagccatcaatgacattcaaaacgttgaatatgccgtaggggctgccgaagacctcctcccagaatggttggataatggctttgtcccaactgccttggtggttgacccaccacgcactggcttagatcaaaaattaattgatgccattttagacagtcggccattgaaatttgtctacgtctcatgtaatccatcaacccttgcacgggatttaaaagccctcgtgcatacgtaccaagtggaaaaaatccaaccattggacatgttcccccaaacggcacgagttgaagcagttgtaacattaacactaaaacgcgacctataacgcaaaaaagcggtccatcaacatgtgtttgttgatggaccgcttttttatttggactttaatcgcctaaacgtgttctataagtcatatccttccggttaaccctgaatggcaaacgattgcttgaagcaatccttcaccattctgtgttaatcctcaggatatacccgacttatgccacactctcattttttaatgctcagaccgtttcggttgtgacgcactctttttgaaacgtgctttcacaaccactttcttccgcttaacgccgaaattagcgtccatgcgcgcccctgattgcccgatgtaaaacgggatgcaaacccgttcaataaccacaatacaactgctccgcgaccatttaacccagcatcccgataacgccgtacactaagcgccaacgttggaataaacgtgagtaccccaagcaacccgataacgattatgtacagcactaatgcaccgctcatcttcagttgcacctttgcagcttgtgcaaatagcaaagcgaaaaatggcatgaaccaaacaatcattaaaatcaacatcgcccaccaataacccgcacgtgttgttcgccccgtaaaatcaaaataacctttaaaataatctcgccaagctgacttaaacgttacttgccctggtgtttcttgaatctcgcgcattgtgaatccccttccaaaactgattaacttaattgtaccgcatttcaccactaatttgatacaataaagggaatcaacttggaggaattcttatgaaaatttatttcgcaaacgctctattctcagcagcagactttgattataacgctaaggttgttgctcaactgcgccaatcgattcctggtgtcgatatctatctcccacaagaaaacgccgcaattaacgacaagaatgcttatgccagctctgaaatgatcgcacaagccgatacagacgaactcgttgctagcgatctcgtcattgctgttttggatggtcctaccatcgatgttggcgttgctagtgaaatcggtgtggcatacggtcgccaaattccaatgatcggattatacaccgacagccgccaacaaggtgctacaaatccacaaaaactagcggctttgcaagagatcgccgaaaaccaattccattacttaaacctttacacaaccggcttaattaaacaaaacggcacgattgtgaataatttagacgcgttgattgaggcagtgcaagcccacgcctaattaaaaataaagccattcatttgttatctataatgaatggctatttatattgtattttgagcataaaaaaaggattcaagctttgatatgcttgaatcccctaggttgaggttgatagcttggttgttacgagctgattctgttttacattctggataatgttacacctcatactttattcaattgtttttaatcgttggtctagcccactgctaatcgtttcactcgatctagtttggtcgtctatctttgacccgcatgtgcagttttagcgatgacgattaaattcgtgtttactacttgagcgatattctttaacagacatcagcctccgatatacttagatcttaatactacgaagagttacacttatgtttccattggaaccacgccttgcaatttctttttcgtactttaaatcttgatgtgtcgtacattcaaatctggtgcttgtgttttaaagtggtaaatctatttaaagctaacttggtttcacttaccaagctatctttcctcaccattaatatagcaccttctgtgaccggatacaatcaaaatgctcttaaatttaaaaaagtttttccatcatttctgacttgttatttttatcagaaatagctaaaaaaactgccattaacaatactgttaatggcagtttttaggatacatagctgtttttttattaatctctaacttgataattgcgttcgtgttccttaacaccttttaaaatgattggcgcgttgtccattgccaaatcaatttcatattcgctaccgtcttctggtagttctgattggaattgattttcgtattcagccatcgtcaattgacgtcgtgcagcaagcattgctttgtggtccgcaccggctaattgtttttcaaatccgggttgcaaaataccggtgaagaattcactgattgcacctgaaccgtaactgaataaaccaattcgatcgccggctgccaattgcgttgattgttccaacaatgaaaggaagcctaggtataacgcgccagtatagatattaccaatttgacggctatacaatgtactttcttgataacggtctaataaatatgcttgttctgtttccgttgcttctggcaagattgtccgcaatgccttcaaacccatctttgtgtatggtaaatggaacgttaaggctttgaaatctgagattgtgcggccagtttgagcgcgatagtctgcccaagttgcttggaaaaattcgatgtattgttcagttgaatatttgccacgcgcaaaagcttcttttgaataattagggcgccagaaatcttgaatgtcatcactgtgaatggccgttgccggttctaacgccaacaaacgtggtgctgcactaacgatcattgcaaccgcgccggcaccttgtgtcacttcacctggtgtatccaaaccgtaacgggcaatgtcagaaccgatgactaatgctttttgctctggatgtgccgctacaaagtcataagcggtcatcaaaccagcggttgccccgtaacaagcttctttaatttcaaaagcacgagcattttttaatcctaataagcgttgtacataaagggcgccggcttttgactgatcgattcctgattcagtacctaaaattaataaaccaattgaatcacgattatcatcatccaacacttcaagagccgcgttagccgccattgtgacactgtcttgactgaggggggcaatggccatttgatcttgaccaattccaattgtgtatttgtcaggatcaacgcctcgcgcgttagctagcatcactaaatctaagtaggtattaggcgtaaaaaggcccatcttatcaattccgatttgcataataaacttccaatctatttgttttcagcacgcagttgcgctaacagctcggtggctgttgctgtatttaaatgtgtcgctttcaataataatggtaataattgcgttaattcagtctcgcttgcgccagcggcaatcgccaacgacttcgcttgaagcgccatgtgtcctttttgaatcccgtctgacacaagtgctttgagcgcggcaaaattttgtgctaagccaacagctgcgataatgccggctaattcacgcgcattctgaacttttaacaagcgctgattaatctgcacggttggtagaataccaatcgatccgccaaccattccaactggcagtggcagttcgattcgaccgcgtagttgctgatcagttgtccattcccaactcgaaagcggttggtaagcaccctttctagcagcataactatgcacgccggcttcaattgcgcgccaatcgttgcctgtcgctaacaccactgcatcgatgccgttcataatccctttattgtgggttgctgcgcgcgccacatccactttggcaaagtcactcgccgcaatcatcttttcggcaattgtttcgccagcaagcgtcgcagttgttaaggtagctggatcaatcgtcacacttgcggtcaccacggattcaaacgcggcattggtcaaaacactcaataaaagattgccgcccaactgttcttgcacagcatgtgcgatggcttcacagattgtgttcacaatgttggcacccatcgcttctttggtatcaatttgcaattcaagtttcaaaaagcagtcgtcaataatcgtcggcgtgattttttgaagaccaccaccgcgtttaacaattgatggatgcgcagcctgcgcaacttcaaataaatgatcattgttgccactaatccaagctttagccgctactaagtcaactagcttctctaacacgacttcaccagtcatcagtcgcgtcagttgttcagtcacaaagccgccattagctcgtgccatcttagccgcattattagccgccgcgataacggatggttcttcgatcgcaaacgggacttgatagtcttgctgattgactaataaatcttgcaccacaccaagcggtacttggtactggccaatttggttttcaatcatattaccagcgatctcatctgacaagggttctgcagctgctaaacaatcagcatccgtctgacttaggtgaccttgttcaacaagcgttgctaaacgttcatccttcgttaattgatagaacttaggctttttcattacaccatgcctcatttaattgaatttcaaaagcaattcctaacccgccaccaatacataacgaagcaatccctgttgtttggtgcgtccgtttcaattggtgcattaacgttgtcatgatgcgcgtgcctgaagcaccgattggatggcccaacgcaatagcgccaccggccacattaactttagcaggatcgacttgtaacccattttgaacggccacacttgaagcggcaaacgcttcgttaatttctaataaatcgatatcggctaatgtttgattttgttgcgctaataatttttgaattgcatcgaccggcgtgtaccccatgtaatctggatcagcaccgacttcttgatagccgaccaaagtggcttggtaaactaatccgagtgcagcagctttttccttgctcataacgatcatggcagaggcgccatcgttaatgccggaagcattggcaggtgttacagtcccatcttgttgaaaagctgggcgcaacttcgccattgcttcgatggttgtcgttgggcggataccttcatcttgttgtacttcaagcgttgctttgcgttgttgcaccgttacaggcacaatttcttcattaaaccaaccagcttgggtcgcttgcgcggctttttgatgagaagcgagtgcaaaagcgtcttgcatttcacgcgtaatgccgtatttagctgctacattttcgcctgtaatccccattggctggtgcgtaaacgcatcgtttaacccttcgctactgatgctatcaatcattgtttgatccccaaatttactaccaaaacgcatttgtttattcaaataaggcgcttgtgacatactttctgtaccgccaactaagacgatgtcagcatcgcccatgacgattgcactctgcgccaaccgaattgcttttaggccggagccacaaacttcattaactgtcattgctgtgcttgattgtgtcatcccactcttcaaagcgatttgccgtgtaacgttttgcccagaaccggcttgtaagacattcccgaaaattgcttgatcaatctgagttggatcaatcccggctgcttcaatcgccgctttagcagcaactgtccccaattcaaccgcgcttaaacttgcaagttggccccccaatttaccaatcggtgtccgctttgcactgataataaccacttcttgcataatatccctcttcatctataagtctaattattactataactaaattttcatgaaacgtctggtaattcacaatttctttaacttttttttagaaatccgcttggtaagctgagattattttaccattttatcggcatcgtgcattactcattagcgtaagtcattcaccggtgacacttacaactaatctttaggaggaatccacatgcaaacatcatggttagcaacatcgatcgcttttgaattacaaaatacagactatccaaatgaaagtttacaacgtcgtatgaccgccgtaaaagaagacgttcaagccacggaaatccaagcagttggtgaagccctcgcaagtctccacgcaggtgacacatttgcaacagctactctaaccactaaatctgcttatatcgctaaataaaaaacataccaatctttgaggaggaattcaagatgaaacaactttgcttagaatttaaaaacagtgatgctaagagtcgtgtattgcgcttaaacaatattgatgacaacttagacgccgaaacagttagaagtgcgatgactaaaatcgcagcagccaatatgtttattaaaaaaggaattgaactctacaaagaaccagttggtgccaaatacgttgaacggattgaaacaccaatcttttctgacaaataattaagcagcatacagcccccaaatcgaatctgatttgggggctttttttgcgttttacataaattgattaacaacccttgtttccgcgataaactttggtgtaggcttacataaagtcgttcaaaggagttatcatgcccaatccatttaacttatcgcaaatattgcaatcaatgttgcttaattgtttactggtaattgcgctgccactagcttttgccgggattttaacactaatcaatcgttcaactaaacggcgcttagcccattggtgggattactcacaacttttaattggcggcctaggcaccgtgattcatgaactcagccatgctgttgcctgtttaatcttccaacaccaaattatcgatatgcaactcttaaaattaaatctacgggataatcccgatcattcgcttggccatgtcaatcaccgataccatcccggccgtctttggccaacaattggtaatctctggattgggattgccccgatttttggttgttcagccgccattttcggactgacttggttattagcacggcccacttttgcaacgtggatgacctttgctgaacatcccacttggcagttaaacgccatcggtcccttattcagccagctctggacgacgcaaccgggtgctctcttgctctggttaatcttaactagcatgattgccatcggtggttatgacttatccgcagctgattttaaaggcacgattccagggattattgccacagtcatcgcggtctgcctcgttactggtctgttttcatttgtgccaacagtcaacaccacgacttggctcattggtgttctaacaccaatggcaattatcctaaccatcgccgttagcttgtcgggtgtttgttggctgattattgccgggattttcgcactattagaaaggacgacttatcatgcgcgtcattgacttactacagctattagctgatacacccaaaaacgatggcatctacttcgaaggccctgaagagctccaacctatcgcccactttgaactcgccgtcgttgacgaacagccacgactattactgcagttaaaggccgcagacaaaaagccgctgaagcagtgggaatttagcctattattaaatcaaaaaaactactaccaacattatatgtatgtccaaacaaagacgggtgactatcctttgtttggttttcgcgttgctgctgacaaaattctactcggataatgtttgttcaagttgcgttaaataacgatgactcgcaatcatttctcgtgcatcattttgatcggctaattgaatctcatagatcgaactggcatcaggatttaacaatggcaatacgcgggcccagttaattttgccagttcctaattgcaacccatcatgcttcaaacccatcgaatcaaccagatgataatggacgacgtgctcacgcaaagttgccaggctctgcaagaaagcattctgatcaccctgcaacttaataaaacaatgactcgtatcaaacgctaagcggtaacctttatcaaagatggcctgatcaaaaatcggattgccataatagaaaatcggtgaaattgaattttcgaacataatattttgtccgccaatccgctgtaaataatcgaggcgcttgaacaaaacacgaatggcatccgtaatattaccgtaacccgtcgtcaattcttcaattggatcatcataagagccatgcaccaatagttggacatcttcagctttcgctaactgcaataaatcaagtgttgattgccataaaaagcggtatcgggctggcgaacttgcttcattcatcgacagttcaatatgatgcccttcgaaactcattgggtggtgtaaaataatccgttcaacctgctgactgcgtacataacgaattttttcgcgtaaacgtactagcccagttggcgtgacatcttcggctgttagatgaaattcaaaatacgttggctgatactgcattcgatcagcaatttgctgatcgttaatccctgcttttaagcctaatcgcatcgtaatccctcttttctctactagttcctatttctattctaacattctaaagacctaagaatcgtaaaagcggctcaccaagtaatggtgggccgcttttttggttggcgttaaacgtgctttttgaaacgcacgctatgcatttagtaccttgttcaggaagtcttttgttctttcgttttgtggggtgtcaaagatttcctgtggtgtgccttgttcgacaatgtgtccatctgccatgaagatgacgcggtcggccacttctttggcaaagcccatttcgtgagtcacgacaaccatcgtcatcccttctttggctaaccgcttcataacggccaacacgtcgccgaccatttcaggatcgagcgctgatgttggttcgtcgaacaagagaatatcaggtttcatcgctaaggcacgcgcaatggcgacccgttgtttttgcccacctgatagcgattgtggttttgcatcgaatttctctgataaaccaaccgtttcaagtagtttcttggcggtttcttttgcttctgccggcgtcattttaccgagttccactggtgcgagtgtaatattttcagcgaccgttagatttttgaaaagattaaagtgttggaataccatcccgattttttcgcgaatttgattcaaatcactcttaggatcactgaggttgtacccatcaacgataatctcaccactcgtgggttcttctaagcgattcaagcagcgcaagaacgtgctctttcctgaacctgaggggccgatcatgacaaccacttcattatcaccgaccgttaagtccaaatcttttaacacttcgttactgccgtaattcttaataagatgagacacttcaattctattcattagttatctattctcccctcaatgtacttcgataaccacgtgagtaacgtgataacgatcagatagattaaggcaatcattgcccagattttgaacccttcaaggttgcgggcgatgataattttacccgtctgtgtcaattcgagaatcccgatgattgataaaattgacgtatctttcaatgtgatgatgaattggttaatgaaggatggaatcataatgcggatcccttgtggtaacacaacgcgccgcattgctttaccatatggtaaccctaaactccgcgctgcttccatttgtccggtgctaaccgcgccaatgccccctttgacaaaggctgcagtataagccccttcattgaacatcagcgtgatgaccccagccacaatcgctggaatcttctgcccagttaaacttggaatcccagtatagatgaataatgcaagcaccaagaggggtaacccacggaaaatatagatgaccgtatctgaaacgctacgcgcaaaccggttaggtaatacgccgagtaatccgaagaaaaccccgaaaatcgttgcgaagaaaatcgcaatgactgttaataataacgtctggcctaaaccgctcaacaacgcatctttattttctttcaataatccaaaaaagctgtgatcaacggttgcttttttagttgattctgtacttaaatattttgctttaattttgtcgtattgaccatttgcttttaatttagcaagacctttattgaatttagcgatgagttcaggattgctccctttcttaacggcaaatccatattcgccaccttgagcaggtttggtgacaatcttgagtttcaagcccgtcttaatcccatattgcataacgggctcgtcttcaaaacaggctgccgaattaccattcacaacatcattatacatattatctgaatcatcaaacgtaacggtggtaaagccatattctttcgctttggccgtcgcataggccccagcggaagtccctgttttaatcgcaacacgtttaccgcgcaacccttctaagcctttaatcttactgtccttttgaacggccattacaaccccggtcttgtagtaaggatcagcgaaatcgaattttgcttgccgttcaggtgtaattgtcatcccggcaatcacgccgtcaatttgttccgactgaacggcttgaaccgctgcgttgaatcccaacggtttaatattcactttaaagccctcggacttcgcaactgccttcatgatatcaatatcaataccgacatattgattcttctcattcgcaaactcgaatggtggataggtcacatccgtaccgatttcataagttttttcagcggcttgaacctgattattcacttgactcccaaatacaaataagcctgcgagtaaacagctgcctaaaaatacgagtaatttcttcatgtgatcctcccctaatgcctgaccaacttctctcatcgctcttaacgcgttattaagattagattagacgttttataatagtatgttaataattataagcataaaatccaaatttgtcgaattttttaccacaatattgaaaagcagactctaatccctaaataatcgcattaaaaaagcccgcagataaggcggactttcactaaatgagaattgaatgagtttattttctgctataatggaagaactactactcaaggagtctactatgattaaacccattatgcgtgacacgcaattcttagctcaaaaagcagttccagcaacaccagctgataccgatgtgctgaccgatttacgtgatactttacaagccaacacagaacgttgcgtcggaatggctgccaacatgattggcatcaataaacggattatcatcgttcaaatgggcgtcttacctgtgattcttgtgaatccacagattgtgcgccaagccaaaccttatcaaacgaatgaaggctgcctctcattaaccggagaacgtccgacaacgcgttatgaaacaattgaggtcacttaccaggaccaagccttcaaaccgcataggcaagctttctcaggctggattgctcagattatccaacatgaagtggatcactgtgagggccgtattatttaaaaaacaacaaaaaacgttcaaccattccaatgttcggagtagttgaacgttttttacaggctatttattttcttttttagggtctttttttaattcttctgccaagtcgataatgtatttcttcaagtcatctttgacttctgggtgttttaacccatattcgatacttgtttctagataaccgaatttgttaccaacatcgtaacgacggcctttgaattcgtgagcgaagacgcgttgggtcttgttcaattcatcaatcgcatcggttaattgaatttcaccaccaagacccggtttttggttttctaaaacatcaaaaatttcaggggttaataagtaacgaccaatgattgctaaatcactaggtgccttatcaatatctggtttttcaacgaagttcttaacgttgtataaatcgtctttaactttgttttctgggttaatcacaccgtatttgtccacttcattatgtggcaccttcataacggctaattgtgatgcatgtgtttcttcatattcattgattagttgtttactcaatggcaccttatcatccatcaagtcatcacctaacataacgacaaacggttcgtcagcaacgaatgattttgcaaggcgcactgcatcccctaatccgtttggatgtgattggcgaatgaagtacaagttaacccccatatcagtcgtttcgttgaccatcttcaacatagcggtcttattcttggctttcaagttttgttccaactctggtgctgaatcaaagtgatcttcaattgggcgtttgcctttaccagtgataattaagatatcttcaatccctgaagcctttgcttcttccacgataaattgaatcgttggtttatcaacaattggcaacatttccttcgccatcgctttggtagctggtaaaaaacgagtgcctaatccggctgctggaataactgctttacgtactttcatctactaaaatcccccataacttatagtctaataacagtatgccataaaaaagtggatttgcaccaattatatgccgaaaatgaggaaaagattaacaagcacttaggattttatcaatcttttcacaattgttttgtaagcgattcccatcattggtattctcaagaggttaacaataaaggaggtcttcgatgtttctactacatcccaaacatgtcaatacatcccatgaatgtcttcccgtgccactcatcatcaaacgtggtattgattataacttctgtgagctggatcaatcgtcaattccccgttcttaccaaactagtattacgagtgacacaatggtgattattccctataaaaaaaaaatcgcaaagtcttgtgttagaccgcataaccggtctccaaattagtccgcgttctacccggcaactaatgcgcgcttataatcgccatcagatcatggacttctcacaaccccggtacctttgccattgtttcaattggtatcgtaagattccacacatcaatggcgaatatcagtatttaccattaagtggcacggctcatcaaaacgcaccgtggttagcgctccactacgtccgtgattacgaagttagcgataaccatctctacgttacattgctaaacgactgtacctgtattctcccttataaaggccgtcaaatcgatactgaaatccaccaatgtgcagccattggcaaagtccaacttggctgtctcactgtgtgtgccactaatttcggctatcaaatcaagctcaaaacttgtttcaagccaagcatcgtccatcgcttcgatgattgccattgccatctgtgctcgaatgttccgaaaacagctactgaactactcggattactcaacgcacttgaaatgcaaaaggaaaatttcatttaccaagccgtaatccatgaataccccgaattcagcgtatttgacattcagtgctatatcaaaagtgttaaagcactaattcaaaaattacgccaattataaattaacccgaagtcgctatttacaatagttttcatttgtatttcaatgcatttgcgcaaattaaagctgaaacggattgatttaccgctaaaatcggcgattacccttctttatgcaaacccgctatagtgaacttaccggtaattcacactgtgagctcatagtagacaggatgctttacaatgacccaatcagatttacaaactgcttttgattttattatacaagacgacacacttatctatggcgttctcaaagatctccacgttccaagacaacgtagcaacttcgccgatctctaccaaatcggtgtgattgcctttgtcgaagcctacaatcatttcccaggcaatattgaagtcgaaacccaccgcttcatggtttacgcgtatcaggccgttaaatggacgattatgatgaccttccgcaaggataataatcgcgacaagcgaatcggcttcgttaaccggataaatgatgatgattccgtgatggactacctcgaccaagtcgcagatccatactgtaacccagaagacgccgccatctgtaacgacctcttcgaacgcctctatcaagtctgtacaccacgcgaaaaacgcttcttagtcctccgctacttctacaacgccagcctaaaagaaatcgccgtggatctaagcatcacacggcgaacggctaataatattaagtttaaggtgcaggggaagtttagtaagctacttgtatagcacaaaaacggatgctctaattacagacagagcatccgtttttgtgttatattgcttactttgatagtattcctaccaattcttatttattatcctgcgaaattgcactgcgtagctgagtactacttgtcgattttgtatatggaaaataaacaatttcaacatcgtctaacttactgaattgttcttcataacgttgaaatctttcggttcctttataatctgatccaacaaacaaataattgtatggaataatctctcttacatcgctatcttccggaagtgatacaattacctcatcaacatatcttacgcttcttacgatttccattcgttcttctaatggaatgaaaacagttttgttcttatgactagcatccttatgaacaccaacaactaaataatcacaatactgttttgctttctttaacatattcaaatgtccaatatgaaaaagatcaaatgtcccactcatgtagccaattttgatttgtggtttttctgttagtcgattacttgcaattttataatcataactattaataccaaattcatgagaatcttctctatttcgttcaataactgctttatacgtttcctcataacctggaattaaaatctggtcttttttctgtacagcagtgattatttcaacagccactttttgagcaggttttgtatcaatcgatttattatttgcaaaacgtgtcccagcaatatgcccaggtcttacatctaagattctattattagagccgtctttttccaattcaatgtttaaactttgaattaatgccataatcgctgcttttgatgctccgtatacagagaaaagtggcgaattaatcatgcctgcaatactactaattacagcaaccttaaaatcattcgatttttgaattctaggataaaactgctttagcacagttgctacagctttgtaattaatattaatttccatattaatttctttttcagaaagattatcaaatttagcgactcttccggcaccaatcgtgataaataatgcgtcaatatcattaaaacgttcagagaaattaaaattatccattaagagattatgtgcaaaaaaattaattttagggttctccacctcagtatgtagcgtcctccccacaatataaacattctgaatttgatcatcatttgctaattcattagccaacgcccaaccaatcccactcgttcccccaattattaaaacatttttcatttatctaatttccccttttttagaataaacagtatttaagctcactaatcgatttttgccataaatttttgtaatgcatcttgccaggttggtacttcaaatccagttgccttgatcttcgttaaatccatgattgaatgtcttggacggaatgctttttgaggatattcgtcggatgttactggactcacttctacgtctttatccttcaagatttcgctcgcgaattcataccaagtacatgaattgtcatttgaaagttgatacaagccatacggcacgtcgttttgaacagcgtataacatgaattcagccaacgtccgggtccaagttggacgaccgacttgatcactaacgactgttaaatgatcatgcgtcttcgcaagatttaacatcgtgtaaacgaagttcttaccatattcaccaaagacccatgaagtccggatgatgtagtatttgctcattgtatttgcaacggcttcttcaccagccaattttgtgcgaccatattcattcttaggtgcagctggggtttcttctgtgtacatttgatcattcgtaccatcaaaaacataatccgtactaatgtaaacaagcgttgcgccgattgcttcagcagcattggcaatgttttgcgttccaaccacgttcactttgtaattgattgacttgccaggttcttcttcagcagcatcgacagctgtataagcagcacagtgataaaccaattccggcttattcttttcgaagtatgttgtgactgcgtctgcattagtaatgtctaattcggctgcatctgtccccacatattcgatttggttttcgtctaataaatgtcgtaattcggtccctaattgaccattagcaccagtgattaaaattttcatcattaactattctccttaaaaaaagtaggcactcgcctactttcatttaattatatttattgaccgtttttagcgtagttggcttccacggctgctttttctgcttgccaccagtcttcattgtcacgataccagtcgatggtatgttgtaagcctgacttgaagtcagtgaattctggttgccaacctaattcttcacgtaattttgttgaatcaatcgcgtaacgcaagtcatgaccaggacggtctttcacctgatcgtaagcatctttgggttgccccattaattctaagattaattccaaaacatctttgttgttttgttcgccgtcggcaccgattaagtaggtttcaccgattttgcctttggttaaaattgcccaaacggcgcttgagtgatcattcgtatgaatccaatcacgcacattttgacctgaaccgtaaagttttggtcgaatcccacttaaaatattggtaatttgacggggaatgaatttttcaatgtgttgataaggaccatagttgtttgaacagtttgaaatggttgcttgtaagccaaatgaacggacccaagctcggactaacaagtctgagctcgcctttgatgatgaataagggctacttgggttataacgggtttcaggagtgaatttttcaccaacgccttcgccgtgtcctggtaagtcttcacgcaatggtaaatcaccgtatacttcatcggttgaaacgtggtgataacgcacattatacttccgacaagcttcgatcaacgtatatgaaccgatgatgttcgtttgaataaaaggtgaaggatcctttagagaattatcgttgtggctttcggcggcatagtgtaccactgcgtctgtcttttgaactaacttatcgactaattcagcgtcacagatatcgccaacaactaattccacacggtctgcgggtaacccggctaagttagcgcgattgccagcgtaagttaatttatctaaaaccgtcacgtgaacttctgggtggttattcaccacataatgcacgaagttagaaccgataaagccggccccaccggtaacaataatatttttcatagtgtgtcgatctccttaaatttcaccgtaaacaaacggattatctttttcaaattcagtaaaggttggttggttggcatctttttcagacgtaattgcttggtcaaaatcaattggccaatcaatgtttaattctggtgtcttgaatgaaataccgccgtcagcttctgcatcatagtagccatcacatttgtacaagaagttaacgttatccgtcaaagtgacaaagccatgggcgaagccctttggaacaagtaattgacggtgattgctggcagaaaggatgtacccttcccattgtttgtaagttggtgaacctgcacgaacgtcaacgatgacatccaagacagccccagtcactacgcgaattaatttcgtttgcgcagctttgccgcgttggaaatgtaagccccgtaaaacacctgcttgcgttgaaagtgagtgattatcttgaatgaaatcaatatcgatgcccgcttctttgaaatcgcgatctgaataagattctgtaaagaatccacgatgatcaccaaagacggctggttcaataattttaacgtcttgtaatttagttgttgtgacttttaacttacccatgattacttacccctaatcttcttttactaatcgcaataaatattggccgtagtcgttcttcttgagtggttgtgccaattcaatcacttttgctttatcgatatagttcattcggtaagcaatttcttctagacacgccactttcaagttttgccgtttttgaacggtcgcaataaaactgctggcttcttgcaatgaatcgtgggttccagtatctaaccaagcaaacccacggcccattaattcaacatctaactggcctttttcaagatatgctttgttgatgtctgtaatttctagttcgccacgtggtgaaggtttaatattctttgcaatgtcgacaacttggttgtcgtagaagtataacccagtcaccgcatagttacttgccggatgttctggcttttcaacgattgatttagcatgcatattttcatcaaaatcaacaacgccaaagcgttctggatcattcacatgataaccaaaaacggttgcgcctgattctttttgagccgctctttggagcatttctgaaaggccaccaccataatagatgttgtcgcctaagattaagcatactgaatcatcgccgatgaagtccgccccaatcacgaaagcctctgccaaaccattgggttgttcttgaacggcgtattcgatgtttaaccccaaatcattgccgttgccaaataactctttgaaccgtggtgtgtcagttggggttgagataatcataatatcttgaatcccggccaacatgagcactgacattggatagtaaatcattggtttgtcatagattggaatcaattgttttgataaagcgcgtgtgatgggatacaaacgtgtcccagaaccgcctgctagaataatacctttcataaaaaactcccccttaagtttgaactaattaatttagaaatattatgtccatttacttcttaacagattttaaaactctgtatattaaatacattagataattaaattcttcatttctccaaaacaaacctgtaaacagaatacataatattaaaatcgcaattatggagcgtacaattattcctgttagcccaccaatcagtacaaatgaagtgattgtgtaaaccatccctataattaaaactcctaaaattataaataaatattgcttgattaaaaatgattttacactctttttaaatccgtaatggaatatttgcctattttcccaccaactacttattaaaatagtcgttaatagagtacctgttaggacaccatttattccccaacctaattttataagtactatcgaaataaaaatattagtcaaagcttctataattgactttattccttggaatctaaaaattccaaaagcaaatagaaatgttgtagctgtttgtcttacctgatataaataaaaattagctacaagtataacaacagttagaaagctaagtaaataacttttaccagcccatattgccacgaatggttgaaaatttactatcagtaacgtcgcagaaaaaactgctaaagtatagttaataaagaagtgcttcttcaacaatttctcaactgattcaatatcaccgttaataataaagttaccaatacttggtgttgttgctgaaacaagtttatttagtaaactttgaattcctgttgcgactaaagcatagtttgaatacttaccaacaaatattacaccgataaaagaagatattattatattatcagtactatttagtacaattccaccaactcttgatccaaatatttctaaaatgtttccttttaatttttttatcttctcatcatttaagggttcagaattattaagtagtaaaaatggaaataccttattgatttttttagttatcgtgatatttgatgtaactgtacataatatttgtactactaaatataagataaagtttttaagatatactaggactaaaaattggataacgaactgaacaatctgaaatgaaacttggttaactatattaacatagtctttttgactagcagttaaaattcctctcttataattcaaaaaataactagatactgaatttattaggtagcacagataaataatataaatatgacttatgacttttccatgaataagatatgggataaatggtaataatataaggccaagtacagctaccatacttccaataattctatatgctttcttataaaaatccatatagccgttaatcaatggaatatcattttcagcaactggtctataaagtgagtaaacaattacggatcctatacctaattcagcgaatgataaaaccgtcaaaacatttgtaaatagtccattaatccctagataagttgctcctaaggttcgaataaatatcgtttgcattaaaaattttatcgtcaaactaattagttgcgccactgaagagtacaacgaattctttatagcataatgcgttcttcctttttccaaatcaactctcctaaatctaaatagtttttctatacattgaactattattgaagtttgtaaagaacattgctagtagtaaagttagtgtaacaattgaatagtgagctggatatgacgactgaatacttccaaatacaacatcaattatataaaaatagccaataagtctagaataactattaaatttaattttcttgacaatatcacagataaaaaacacaaataacgataaaaatagaatagccccaactattccaaattgagcaaaaatcataggccaataattatcgttcagaaatagttttaaatccggtgacatcccccaggcttgagaaataccatattgataatataatactgaataattatccgctgcggctgaagatccccaagtagcaaagccacttcctaatggtagatgctctttaacaatttgtattgcaccaacaacaaatcgctgtctaggtgttacatcctctaaaaaataatgtacaaattgggaatatcctgcatacaatgaaacgagtacaattggaattaaactcttttttacactttccttttttaaaaatataaaatagtaatataatacccaaaaaactagaattaaaacaattcccctcgatcttaaagtaagcaatacaataatactatttacaagaagcatcgggatttgtgatcttctaaaataattttcttttgcaactaataataatataaaatatgaaacttgatttattactaaacctggcgttccataaaaaaatgcaaatgatctaataccgtatctgatatcatacgacatattgacatctacaaatacgttgagtaccgcataggttaacattaataaactatacacattacatattggtactaatatatttactatcctttttaaatctcttacactgaataaatttaaaaagtaccttgctcccatccaaataaaaaacattttaaaagtacttacaaaatcactaaaagttataaataatgaagtctgatatttaaaaacatagtttcctaacatacctaaaactaaacaacttaaaattaataataaatagataatttctcttttttgtattttcatccctttgaaaatacaaaaaagagttagccccaaaaataaaattcccaggatttcgtctgtatacttaaccggtgtaaatagattctggagtgtattctgaaatattaagataaatagtatcactggtgtaaaaaaattagtcagtattattttcatatataattaatccaattcatcttgtctcattaactctataaaggaattagtggaagctaacaaacagcctaatgtaaaaacagcttttttatatttagacttaaccgaaatatccgtagaaacatcttcgtagtgaataacctctatactgggatcatatattacattatagtttttcttctttgcaatataatataaaatatatgattccatatacataaaagtttccccataaaagcattcatcttcatttaatatgaaatctttagaaaatacataaattgaaccatgtaaaattacatcattttgtattactttacgtttatcaaaagttggctcatatgccttataatttacttttttcgccttttttaatttccattttaaaaaaattaaaaacttcaatctcaattttaatttaattttctttcgcttagcttctaaatcagctaacgtaaaattatttagtgcttcaggattttgatgtttaccatctcgcatagaaaaaacatccggtcccaaaataccaaaatggtttttttcgtaacttgcttctaataacgaataaaaattattttgtgttagcaaaacatcattatttaatactgtaataaattcagttgtgtaattttctctaataaactgatacccagcgttatttccatttgcaaatccaacgttttcaggtaattttaaatattttatttcttcattgtttgtataatgctttctaatattgtcgagcgaattattaggagacgcgttatcaacaacaacgataactttctcttccttaatattctctaaaattgaatcaatcgtcttaatagtatattcacttgtaatataatgtaggattacaaagccaatcatccttttacctccattaacatatcttctatatatttaatattcttttcaataggattatctctatcaatagatactaactgattggcttgtgggcctgcatataaagagtcacaagcttttgaataacccattagaaattgattgagtttttctggcgataaatcatctatttttgtaacgtgtctatccctcactctgatactatcaattgccttagcaactgatacatgattatagatgcataaatcagtattactaatcaatttataaatttgatttctattttttaacgtaacgtcaaaatctacaaccatagtagctatcgtatgtaaaattccttcatccgtcactatagatatcttaaatatagccgctagtctataaatgaactttaaatatataatacgttcaaaatattcttgtatatctttatgtgcagtgtataaagcctttatactactcgtttcaatatacttatcactcatacgtttaattttactactgaaaaaaaaacttatagtaaccattgctattttttttactattctccctattatcgaacttctttcccaaagaatataatttttcaactttttattacgtccaaccaatctttttgtgaaataactttttccagatccgggaataccaaaaagctcaatatttactacattcattttttcaaagttcattaatatctccttaaccaagctactaatctatacttaacaatctcttcttctgtatgtctattaatctatcattttgttctgttgatactttattacttaatttctgaaatgatgttagtcctatctgtttttcaatatcttctaccataagattgtccctaataacagaaataagaactgtatgcatctgagaattgtcaatcggtattatttttttatatagctgtggtttctctaaaaatactacttctaataaatgatgaactaaaaaataatcaattaacacattcttttttgaccaatacaaatataataactctaacgttctataggctatatcatttctttttttactcgtcattaaccaactagaaacgaacaatgctcttccatctcttcccggttttaaagactgtggtacaaaaaaatcagcttcttcaacataccaaggaattttactttctgcgagcataacagttgaatcaatccaaataccaccgtatctcacaagtaattctaatctgataatatctgaaagatgtgtattagaaataataccacttttccatttatttaaaataaaggacggtaagctaacatactccataatgttttcttcagttattaacttaattcgttctctttctacactagaattcaatatttcaaagttgtttcttaccaattccggtgctttgtcaattccttgcagccacatgaaccagatcggtttcttattattttctaaatttaatattactttttcgcaatagctatctggactatatttctcatcgataactgtattcatatattttttcgttaattttttatgaattcgttccgatatcgcatttctaaatatttctaatccagtcttactagaacataaaaatgggaagattagcaatgcatataataacactccagcatctttatactgcttaactaactttatgccaccttgtgattcaaatctctgttttattttttttaataatttcaaaatgttttttcctttttatttcactttgatttggaattttcatataatctccgtacaaccacttcaaatataaatctgtattatccggtgctgaaaagaaagtatcttcaaacctcactttttttaaaccattgatacattctccgggaaataattctttttctctgtaagctcccattaaagcacctacatatttactgcctcgaactggatttctttttagtaatttatcaattcgcataaaaattttattcctatttaatagcttatcaaaaggaatagtcttggcgattttcaccattattttttctattggattacgtttacgtaacatatcaatattattactttgggatattgaagctagcattctaagaaacataatccgccaaataaatactttacgaaccaatttattattaggcgtaccatctattggaaataaatctattgaagcataggtttttgcggtgtcttcagcatcatctctaacttctcgtacttcaacatttgtatccaaaattctcgtaacgtagtactttgctgaactatcagttttaaaatgttgtaccttatatctatcaggtaattccttcgtatatttctccaaaaaaacatcatatgattttctcggaataccgatatccgcatcgtcatcccagggaataaacccaccgtgtctcacagctcccagtaaggttcccgctaataaaaaatattctagattatgtttatcgaatatttcggttaccgcttttaacatctcataatcaacggcatggataatatctaagtcagtatcactcatttatagccaccccgttaataaaactactttcatatcgatcaataattagtttccaatcaaattgttcttgaattcgcttatttgataattcgtccagcttactaaacttatcaattgttaagctttcgttgttattaatcatttcttttaaattaccaacttctttagaccagtacaatgcaccgtctttaccaacttcttcattgaagccaacatttagcaatagattaatttttgtactccctagagcttctagcaaggaaggattagtcccgccaacttcatgaccatgaagataggcaaaagcattttcacgaatatacttcaacaattcagcatcgtatactgttccaacaaacttaattctaggatcagattcaaaatttgttttattttgtaaatctgcataaaatttatttttttcaacatttgaaataatgactaaatccttatccgtagcagagttcataaattctctaatcatcgtttcataattgttttcgggaacaaaacgtcccacaattaagtagtagttgtttaacttaaccgcgtgttttgtgtaccagtctgtgacaacctgatcagtgtccgtcaaacttgatttaatgatatctgacccataagcaatataggttgtcttaggtgaatattgcttgtaatcattttgaatgtacttctcaatattttggctgtcacaaatcaataaatcagcatgttttaccatcaatcgttctgaatacttccaatacttacgaactggcatactccacttagcgcgtaaccactcatgaccgtctggattgacaaacaatgtaccgttgtattgttgtaattgcttcttaaaatgcttaataaaaggccccatccggcaagctaatacataaacaatcgcattttggatattatttttcttaatataattcattgtccatttaaaggcatttacatcatacagaattgctttagcaggtcctacatctggaacatcaatattgaaacaagttgcatcattatattcgaacgtatcagctttattttccgatagatcacgtcgacaggcaacgtaataatgaatattatcgctttccttacgtgccgttaactgttcaacgaaagattcaaaccctccataatttgcaggaattcctttagccccaataataaatacatttctagtcatttctattctccccaactcaatatgcatcatttggcataatcataattttgactgttctgaagagaatacccaaatcataaaccaaactactctttttaatatattttaaatctaattcaaccatttcatgaaaaccaatactattccgcccactgacttgccataaacctgtacaaccaggtttaaccatgagtcgttgccagtcataatccgtataatccttgatttcccgttctaatggtggtcgtgggccaaccaatgtcatgttaccaattaggacattccacagttgcggtaactcatcaatactatatttacgaatgaacttaccaaccttagtaatgcgtgggtcttccttcatcttaaacatcgcaccttcaacttcgttgtacttcaacagattttttaacttttcatctgcatccgtacacattgagcggaatttatacattttgaacgttcgctgttttaatcctaagcgcgtttgcgaataaaaaacgccgcccgcgggatcatccgttttgattaaaatcgcaagcacgagaaaaagcgggctcagtaggattagtcctaccaaactcgctatgatatcgaaaagtcttttgataatacgataaccataccgttgatcaataacagcttggttaaaaagcatgacttggcgtgtattctcgacctctatcgctttatcaaggttctgcttttgtacttccatatttttcccccccaggtttattactttatttcctctgctccatagtacccaccataataaccgccataatagccgcccgtattctcagccttcacgcggttcataattgttcctaaaattcgggcattaacgacttctaacaactcttttgccttggcaaccgaacccttttcaacaatcccttgtggtaccaccaaaattgtcccatcaactttgctagcaaggatttgtgcatccgtcaccgatattacaggcggtacatcaaaaatcactaaatcaaaatgctttgttaactcttggattaatttatccatcttcttcgtattcagtaattcagatggattaggtggtacaaccccgcatggtagaacaaataaatgatcaactggtgttttttgaatcgtattagttaaatcaaatgtttcctccgttaagagtgatgtaagtccacgtttgttcggtacttggaaggtttgatgcactgttggccgccgcatatcagcatcaactagtaacacatcaaccccttgatcagcccaagtaactgcaacgttcgcactaaccgtggacttgccttgtgatgggccagcagatgtgaagacaacactccgtaatttttgatcaattgacgagaattgaatattcgttcgaaccgttctgaattgttccgcaatgactgaagtcggttccgttaacgtaattaagccaaccccttctttcatacttgcttgatctgaactcttttcttttttaaataagcccatttccctatcctcttctcgataagcgactgctacttacgttgacaatcgcttttttaatcaaatctttatcagcaatattattgacaattcctaaactggttaaaccgagttcctgcgttaagaagctttcttccttaactgttttgtccattaattcccgtacaaaggcaatcccaacgcctaataatacccctagcaccagaccaattaagacattcatgttctttttgggtgacactggtgttaaattcggtttggcttctgaaatgattgagacgttgtcagtcccactcataattttaggtgcttttttctggaatattcgtgctgttgtattgacaatatctgccgcagtataggcgttatcagacttagccgtgattgagaagacttgcgaattttgattattagcaacactaagcatgctagcaagttcaccagcagtaagtttgtggccatcccccttattcatcttacttgccactgaatccataataactggtttcgtaattaagtctttataggtgttaatcatctgaacatcagcttgcacctgattcagctgtgcaccaacatctgtactttgtttacgattaactaagagctcagttgaagcactatattgtggtgtaatcaagaaaaacgtaacaatgattgctaacagcgtacatacaaccgttgatgatagaataaggcggcgatactttcgtaaaatgctgaaaacctgttcaatattaatcgtttgctccatgataccctccaaaattaattaacaattataattactttgctccacgctgaaagaagttaaccatcactggttagcttctttcatgattatttcaaatctaattgcttccgtaaacgtgtcgccatttgtgctacctcggttggattcatcacttggaaggattgcccgtcaatcatttgacccgttccttttagttgaagtgtcttgaagtgcatggcatcgccatagttttgttgaatatttaagacatccttcaaagtgatattagtctgcatattattttctaagacttgcaagaatttgttataattcgtcaccatgtttaatgacgtagctttcttcaaaacagcttgaacaattgcttgttggcgaagttgccgaccaaagtctccgcgtggatcgtcgtagcgcatccgtgagaatttcaaagcagttggtccatcaagactgactgttcccttttcgaaatggtgaccttcgtaggtaaagtccaaatcattatccacggtcacgccaccaacagcatccaccaattgttctaagcccttcatgttaactagtacgtaataatcgaccggtacgttcaagaaggcttgcacggtattgactgccattggaattccaccgtaggcataagccgcgttaatcttagccgtttgaccgtaaccaacgattggcacgcgagaatcccgggcgatactcaacatgttggtttccttagtcgttggattgaccgttgcgagcatcattgtatcagtccggcctttttcggttcggcctagttcccctgtatctgtaccgagtaagaggatcgagaaaggcgtcttcttatttagttcgactttttctgaaactttgcgcttattttgtgtcttacctttggatttatacactgtcttggcggtttgattaacatccatatagaccttagctgcgaatgcgcccccggcaagaatcaataccccaagaacaactaaaatcacttttgttaatgtccaccctctgcgccggtgcttatggtgatggtgtcgcttctgttcttctgcagtcatccgtttcgtatcctcctcgaaaactaaacaaaaaaataatcaatcacattacatactatttatactacaatattttctattatagtataacttttattaaaaaggaaatctttttctggaatacaccttaataaaaaacacttagttttcacactaaattgtgaataacccccttaacattgggcggtaattcaatattcaagatttttaaataattaaatatttttaaagtatcgaaagtgaaagtggtttacgaaatctaagtccatcaaaaaaccgatatgtaaaaacattagtttgacatatcggttgagataaataattttaattttagagactaaaaataggttgtaatcatccggttgattcccgaattcttacaacctatataattggttaacgtttcaattcatatttgtgctttgtctcattaatttttcggctgtcattcattttgatcgcgccgacgcgcaatgaagtcatgaaccttaccgcgactggcgttaacatgcccatgcagtgcttcttcaatcacaacattcaagacagccccaaccatcagaatcgttgcggaataattcagccacaagagtaagataatcaccgcaccgattgcaccgtaactattccatgacgtgccgaagtaacgaatatacaatgagaaggcttgtgcaagaattaaccagccaaccgttgtcagtgctgcccctggcaaaacacttcgcaatcgcattttcacattcggaacgaagaaatagatgaaaatcagcagtaggaacaaggcgatccccgtcactggccattttaaactactaaaaatattaacgtatgtcttaggaatgttaaagattgggactaataattccaaaacttgttgcccgaatgtaaaaacaacaattaaaccaactaataatagaagtaataataatgtactccccaaagaaatcagacgttttaaaacaaagttctgaactttttcaacacgatacgcgcggttaatactattttttaaggcattaatccccatgctcgctgcccacaacgtccccaagatcccgacggacaataagccatcattgcgtttcttcaatagggactgcagaactggcataatcttgtcgaatatcgtgggcggcaccgccgtttggacgtaatccgccacactcattacatctaactggaagtacggtaagatgttcccgataacgattaatagtgggaagattgataataacgaataatatgcgattaccttcgaattatcactaatgcttgcttctgatgaacgcaacatcattaacttcaccacagcaatcaacttctgccgtctggataagtcctgttttaccaccggtaactggttttgattgtctactgtcatatgtcactccaaattctcttttacacattagtcgttctacctgaaaggcttattttcccgacttcttaaggcatgtttatcatttctattatacacgaattaactatgggctaatagttttctgaaagcaaaaaaagaaaccttctcattttagagaaggtttctaattttatagtaaatatttagcatccatttctggatcttgtgaggttagaatcttaggaccatctttggtaatcgcaattgtgtgttcatattgcgcacatggtgtgccatctgctgagacgtaatattcccagtcttcgccagggacttcttttgacttgatgtgccatgtaccacctaagatgaccattggttcaattgtgatggtcatcccttctttaaggcgcaagcccttgcccgcttcaccgtatgaaggcacgtttggttgttcgtgcatcgttggttgaataccatgtccaatcaattcacggacgtcaccgtagctgttttcaacttcggtatattgttggatggcgtggccgatatcacctaggcgattgccgacaacggcttgatcaatgcctaagtaaagtgctttgcgcgtatcgtccattaatttttgtaattctggtgcgatttcgccaaccgcataagtccagcaagaatcactttcataaccgtccaagttaacggtcatgtcgacactgacaatgtcgccttcttttagaattaagttcttccgtggaatggcatgtgccacttcttcattcacgcagacacaagttgcgtacttgtagccttcaaagcctttttcagatgctttggcaccgtgttgttcgatgtagtcgtttgcgaattcttcaattacccagctcgaaatacctggtttgatgatgtcgcgcaaaccgcgatgaacgccggcaataatggcgccagaagcagccatccctttaatttctcgttcagattttaatgtaatcaaaatgaaacctccaatattgttaccattgtagcctttaattgtatctatttctatattatacgctatctgccattaaaatggacgaatcgtcgctttttagttcaattaaccgtgaaagagccgttgcaccttttcttaataaggggcttttgctataatgccttatagtataattcgttaattgcggccactgagcgccgcgtacgtgaaaggatgtcccaataatggcaactgctaaagtagtctatgcaagtatgaccggcaataacgaggaaattgccgaaatcgttgaagaagccctcgaaagtttgaacgtcgacgttgaaaccactgaaatctctcaagcagatcctgccgattttgaagacagcgatatctgtatcatctgcagctacacctatggcgatgatggcgatctccccgatgaagccgttgatttctacgaagatctcaaggatattgatttaactggtaaagtctacggtgtctgtggctccggtgatacgttctacgatgacttctgtaaagtggttgatgatttcgcagccgtcttcgaacaaaccggcgcaacaaagggttcagacgttgtcaaagtcgatctatcagcagaagcagaagatatcgaacatcttgaaaaattcgtatcagagattgttgcaaaacaaagtgcactataagctcggtcagtatccgagcactaacctagtccggcacaggatactagcttataaagcacgtttcaaggcagagtgcgttgtaagcctgattatcttctgaggattagcctaatcaggcggattaccgacaacgttggtgatttgactgatgtcgctaaccggaagaagatggcttccgcagcacgtttcaaaacagagtgcgtttgaaacggttatgctttgagcattaactggatttgccaaataggtgatgcaatcacctatttggtaaatttggttaagcgcagaagtatgtttcaacaagcacgtttcaaccaatcttccatgggccgcggttacgtccctttttaccgcggcccttcttttggtcttttagaccttaataaatcaaactaggagctgtctttatggctttcattaaacggttagtgtttaaataccgcgattttttgacctatacgatttttggttttttagcatcgttggttaatatttttacttactgggtatttcgccacaccattatttggccgtatttactcgccaatacaatggcgtggtttgtcgcgaatttatttggcttttttaccaataagtcgcttgtattccaatccaaatacaccacgtttggcgctgtgtgtcgtgaagtgctttcgtttttctttttccgtggtgtatcctttttcttggataacggtttgatgattgtcgccatctccttcttagggtggcagagtatgaccgccaagattatcgatcagttaatcgtcggcattgtcaactacatcaccacccgctacactttcaaaagaacagaacaacaaatggcactccggggtcggattctccggcgatacaatgccattttgaaaagaggtcacaatgattaaagccatccaacaactcattcaaaaatactgggaacaattaatgtacttggtctttggtgtcttaacaaccctagtcaacatggtcgttttcttcggattagaccactatacaactatcaattatctcatcagcaacacgattgcctggttcttatccgtactatttgcctttttcaccaataaaacgtgggtctttcagtcaaaatatacaactttaaaggacttttcccgcgaaatggctagtttctttttcttccgtggtatatcatttataatggatacggcaattatgtttgttgggatttccttattggtatggcccaacatgattgttaaagtgctagatcagattatcgtgattttagcgaactatgtatttagcaaatggattttcaaagatacttcggaggattaagatgactaagacgatttcaattattgtaccctgttataacgagcaagaatcaattccgcttttctacgcagcagttgagaaagtagcggctactctagccgaccaccgcatcgaatacatcttcgttaacgatggttctgctgatgaaagcctggcggaaatgcgcgcgttacaggcacaagaccctgaacacgttcactacatttcattctctcggaacttcggtaaagaggctgccttgtatgctggcttacaagccgcaactggcgactacgtttcagtgatggatgttgacttacaagatccgcctgaactattacccgaaatgattcacggcattgaagtcgaaggttatgactgtgtcggcactcgccggacaacacgtgcgggtgaaccccccgttcgttcgttcttcgctaaacaattttacaagattatcaaccggatttcacaaactgaaatcgtggatggtgctcgtgattatcgcttgatgactcggcagatggtcaatgccatcttagagatgtctgaatacaaccgtttttcaaaagggattttcagttgggtcggctttgacaccaagtacttagaatataagaaccaagaccgcgttgctggtcaaaccagttggtcattctggggactcttcaaatattcattggatgggattgtaactttctcagaaacaccattagccattgcgtccttcgtcggctttttctcattcgtgattgccctgcttgcattaatcttcatcgttattcgtgctttgatttttggcgatccaacaagcggttggccatcactcatttcagttatcctaatggtcggcggtttacagctcctatgcctagggattgtcggcaaatacatcggcaaaatctacctagaagttaaaaacagaccagtgtatattgtgaaagaaaagaaataaagtgcgtttggttgcacttagcaactgagtattaagacaaaaaacagtttgaatccgcacgtttatctcatcaaaaaaagccctcgccattatcagtcaaaatgataatggtcgagggctttttcaatgctcattatttaaacgcttctggtttttcttttgattggccaaaatgataagcaattgcatctaaaatccgttgagatgcttgtccatcaccatatggattcttggcatgggccattgcttcatatacggcttgatcatctaataattcaaccatggcatcatgaacttgttctggttgtgtcccaaccaacttcaacgtgcctgcttcaaccccttcaggtcgttcagttgtatcccgtaagaccaacacaggtttgcctaatgacggtgcttcttcttgcacaccaccagaatcagacatgatgaagaaactccgtgcagctaagttgtggaaatcaacaacatccaatggatcgattaaatgaatccgtgggtgattgcctaagatatcttgcgctgcttcttgcacaacagggttcaaatgcactggatagacgatttcaacatcatcatgggtttcaacaacttggcgcattaccttgaagacccgtttcattggttcaccttggttttcacgtcgatgcattgttactagaatcattcgtttgtcagcatcaacaacatccaagattgaatgattgtagtcgctttgaaccgtttgcttcaatgcatcaattgcagtattccctgtaatgtaaatagccttttgtggatgattttcttgtaataagttggcttcactttgactggttggtgcaaaataaagatcactgagtacatctgttaattggcgattcatttcttctgggaatggtgaatacttatcccaagttcttagtcctgcttcaacatggccaatcgctgtttgattgtagaatgcactaatgcttgctgcgaaagtagtggttgtatccccatggactaatacgatatccggtttttcagttgcaatcactttatcaaggttcattaatacgttactagtaatttcactaagtgtttgtcgttgtttcataacgtctaaatcgtaatctggtttaattttaaaaatttcaagcacttgatctaacatttgacgatgttgggcagttaccaccgtcacagcttcgaattcatctgcgcgttctttcaatgctaatactagcggcgccatcttaattgcttctggtcgtgtcccaaaaacagtcattactttaattttagacacaaatttgcctcctaccatttaataagttaacacctcctatattacacgttttataagggtttgccaatccattgcagtcttattcccttgagtcaaatgaataacagtctgaatataaaaaaggacgcctttttaggcgtctctttttaaaaacattgcttcaacattcgcttgagcatcgcgtctatttctgcgtcactatagtataccaacttcgcattcgttaaggtcgccaaacccgtaataatgatccacgcttcgttaataatgcgttcgtgttctgactcactaaccgtttttaacggttgatagtcctgcaatctagtttgtgtcaattgccccatgaaaagttgtgcttcatccttaccaaagtggttatcaataaataacgcacggtaaagttctggttcgattgtagcaaaatgaatatagccaatcccgagattgactaaggcatcatctgttcgttgttcttcactgacataccacaccaaacgcgccttggcttgttccaaaatggcttgcttgagattggccatattaccgaattctaaatagatgggttgtgtcgaacattctagtgccttggcaaggctgcgcgctgtaattgcttttaaaccatccgctaataccatttcgtatgctttatccagaatttgctccgctttaatccgttttgtccgtgccatcgttcccactccttaaccgatcaatccgtttttcaatattatctactgtcactctaccacaaaattaaataacatgaaaacgtttttatctgttttacgagttttttaaatcgccatgtgctatgataaacatattaaatcgcccttaaggaggaatttttgatgactactttccaacataatcttgaaaaatacgccgctttagtcgctaaaacaggaattaacgtccaacctggtgatacagtggttttacaaatcgctgttgatcaagctgaattcgcccgtgatatgacagctgcttgttatgacctcggtgcagccgaagtgattatcaaatggcaagatgacgacatcgatcgaatcaatatgcaacacaaagccgaagatcgcctcgttaacgtgccagacttccaaaaacaagaatacgattactggttagcaaacaacgccaaacggatttcggtgatgtcgagcgatcctgataaccttaagggtctcgatggtgatcgggtcgctgctgttcaaaaggcaaacggtcaagcaatgcttaaagttcgccaagcaacacaagccaacaaaaatagttggattgtaattgccgcagctagtcccgcttgggcaaagaaagtctttcctgatatggacgaacaagccgcaactgataagttatggacagagattttcaaaacaacccgagtagataaagaagacccaatccttgcttgggaacaacatggtaagaaactgcaagccaaagccgctgaattaaacgctgcgcaatacaaagcactccattacacagcccctggcactgatctcacaattgggttacctgaaaaccacatctggatgggtggtcctagccgtagtagtgatggtcgttcattcgtcgctaacatgcctactgaggaagttttctcagcagctgatgccaacaacgtcgatggctacatttcttctacgaaaccattgagttacgctggtaacacactcaataacatgcaatttacttttgaaaacggcaaagtggtcaaagccaccgctgaagaaggcaacgatgtcttacaaaaactcttacaaaccgatgctggggtcaagagcttaggtgaagtcgcacttgtaccagatccttcaccaatttcacaatcaaagatcaccttctacaataccttatttgacgaaaatgcttcaaaccatttggcactcggctctgcttacgccttttcaattgaaggcggcacagatatgtctgaagaggaattaaaagcagctggtttaaaccgaagtcaagcccacgttgacttcatggtcggttccagtcaaatgaacatcgatggcttaacacacgacggtcagattgtccccattttcagaaacggtgactgggctgactaatgattacatggctcatgctccttggcgtctgcgtttgtctaaccaccttcttcattggactaaccgcctatagcgcctaccagaaacaagcgattggtggtctaatcattgtgtgcgttgccggtttagtcttaaccgcaatcacggcattcttctactaccaagcactgacacatttataattcgaaagggtcgcgacaaaattttttgttgcgaccctttttgatgtgctagactgttggcatactttttgttcactatatcattattcgttagtaataatgattcgtatgtactggtataacaggttttatacaatgtttttgttgtgaacaattgctcaaaaacaattgataatccttctcaattagctataatgaagttaaatcaaccagaggagtccgccattatgaaagaattatccgccagtgcaccacttgaacatcgtttccatttatcagaacgtttgaacattatccgcgccggcgttttaggtgcaaatgacggcattatctctgtagctggaatcgtagtcggtgtcgcgagcgcccaccaaagtcagtacacgatttttcttgctggtatttctggcatgcttgctggcgccttttcaatgggtggcggtgaatacgtctcggtcagcacgcaacgtgacacgcagaaatccatgatgcggcttcaaaaagaagccatccaaaacgaatacgctgctgaagtggccagtctacaacggacttacgaatcaaaaggcttacccactccacttgcacatcaggtagcttcagcgttcatgcaaaaagacagtcttgacatcacactccgcgaaaaatacaatattgaattacaccattacttcaacccgtggcatgccgccttttcatcatttttctcattcatgttaggctcattgctgccaatcatcgccatcctagcaattccatacccttacaaagtcagtggcactatcggttcaattgttcttgcccttatcgcgaccggttacacgagtgcaacgttaggcaaggcaaaccgactcaaaggcgttttacgcaacgtcttaaccggcgtcttaaccatggtcgtcacctatttaattggtggttctatcggctaagcttcacttttaacctaaaatttgctatgctataactaatttaatcgtcgccaccgggcagttaatcacttcattaggtcaaagaagaagtgattggctgtcctttttttgtggccgatattattaggaggttctattgtgtggcatgggttgatttattgattgcaggattggcagaagtttggtgggcaacgactatgaagatgagtggtgggttcactaagctcaattacacattactgacgattgctggcatgctcgtcagcttcggttttctaattcgtgcgacgaagggattaccattgagcattgcttatccggtttggaccggaattggcgcagtgggagctattttagtcggcatcatcttattcaatgaacacatttctttattaacctggctattcgttattttattagtaatcggaattctcggcattaaaatgacgagtggtcattaaaaaataggcttacccattttgggtaagccttatttattaacgtgttctaattgccaactcgcgatagtttgaatcaactcgattggtaatgccgttacatctttttcgaattgtagtgtccctttgccggtctgacatggtgcgacagcttttgcaaaatgggccatcggttgattagtgggataaaacccaatgtgccgtttattaatgccaaaatagcaaactgctttaggctgataatacccaaccaaaccataagccagcttcatctctgcgtccggtaacactgcccaaagaatggtgtgcattgccagtgcgagtgttcgatcagcatcagttgtaaggcctgcattatattgctcaataactgtcatcttatccccacctttattttgctctcattctagcatgaaaccacaaaaaaagcccaaccgaagttggactcttgaaaaacaataattatttaacagctggtgtaccgaaccattcgatacgtgattcaactgtgtctttgattgcttttgtacctggtgcaagaactttacgaggatcgaagcctttttcagcttgatctttgttttctgcatagtattctttaacagcgtttgaccatgcgatttgttgttctgtattaacgttaacttttgagatacccatttcgattgctttaaggatttgttccttaggaatacctgaaccaccatgtaatacaagtggtaagtcaatagcgtcagctaattcttgtaaacggtcaaagcttaaaccttgccagttttcagggtatacaccatgaatgttaccaataccaactgctaagtagtcaggaccagcagctgctaattgtttagcttcttcaacgtcagctaattcgccagcaccgatgataccgtcttcttcgccaccaattgaaccaacttcggcttcaactgagatgcctttagcatgtgctaaagcaacgatttcttttgtctttgctaagttttcttcgaatggtaaatcatgaccatcgaacataactgagttgtaaccaacttcgatacattctttagcagcttcgtagttaccgtgatctaaatgcatgataacaggaactgtgatgttcattgacttgattgtttgttcaaccaagttcttgcataattcgtaaccacccatatatttagcagcacccattgatgtttggatcaagattggtgtgttagtttcttgagcagcacctaagatagcacgtgtccattcaaggttgtttgtgttgaaagcaccaacagcgtaatgaccttcacgagcagctttaaagatttctgtaccattaactaatgacatgaaaaagcctccagattaattgcaacttttgcgttgcgatttttgaatacgaatctattttaacatattttcacctaatataaatcataaatccgtaactttctgaaagtgaaagcgtaatcattccgcttgattattttacaccaattaaaaagcacactagttaatctagtgtgcttttacgacaattgcttcaaagtgcgcccggcgagaatcgaactcgcaacctatcgcttaggaggcgattgctctatccagttgagccacgagcgcctatgagtcatattgtcgcatctgttgttttaattgtaaagttgattttaataaatctttattcatccgttaaaacggcgttcatcgtttcttgacctaaaaagaacacggcaccagccgctaatagtatcgcacccgtaaaaagtgtaaaaatcacggctactgataccccctgctgaattagcgcaccaactaaaaatggcccaaccacaccgccaattcgcccgatgccagctgctaaaccactcccacttccacggacaagtgcaggatattgttctggggtataagcatatagcgccccccatgcaccaagattgaaaaaggataacagcgcaccggccacgagtaacatggcaactgagtttgcattgccaaacaataatgcactgagtgctgttccgattagaaagccacctaaaacacgtttccgcccccatttttcaatcaaccacgctgctacaaagtagcctggtaattgtgccaaggtcataatcagcacatattcaaaacttttaaccaagctgagcccttttaagaccatcacactggggagccataaaaacatcccatagtatgaaaagaccactaaaaaccatacgagccataacataattgttctttggcgatacgctggttcaaataaaacacgcaatcgttgcatgaatggtaccttacggttaatcgtcgtcggttcatgctcttgtttaacatgtttccgtaacacaagtgtgtagatggcgggcaatgacgtgatcaataagaccactcgccagccccaaactggaatgacaaaataggcgagtaaactggcaactaaccacccggctgcccaaaaactttctaacaatacgacagcccgaccgcgcgatgccgttggcgtattctccgagattaatgtcgaggctaccggtagctcgccacccaacccagcaccgaccaataaccggagtactagaaatagactcaacgatgtactaaaggcagatatcccattgccaatcgaaaatactaataaggaacaaagtaaactgttttttcgaccaattttatcagctaaaatgccgaaaataacggcgccaaaaaccattccaattgaactgacactcccaattaatcccatttgtgcgctactgagttgccactctttggcaagcgcagcaatcacaaacgatagcatccccacatccattgcatcgaacaaccatgcaccacctgcagcccataaaagtgtcctatgttcttttgtcatcccgcattactcccttatgttatgaatggtcctatcatacaaaaagagtttacagatgtcaagacacctaattatgcattataataaatatttatctgtttaagcgctgcgacaatttgcttaaatcgttgttctgacgcgcattcaatcgtgtgtaaatgaatgccgtcggttaatgttgaaagtaatttctgatggggcattgtggccattttttgcataaagcctttgacatctgtcaaggtgccgattcccagttgaccggtcagttcaccatacaatggatgatcaacggtcacgtcgatcacgcgccccccattttcaacaatcgttgtcaattcgagttcagtctgcccctgattatgctgacaggcaacttgtgcctgatatggcattgtttgttgcgtctgcgtttggtcgtaataaccgctaactgtcgcaataatttgggccccttgtgcgcgaagtaaggcgatatccccaacaattgtctgccggctaactttatattgttgcgctaatactttggcactgatgggttgcgcactcttttgaattgcattcagaattgctgtacgtcgttcttgcgttgtcatattgccacctcgtcttgatttcttacgctatattctaagcgttctaaaggcaaaaagaaagtggagggttgaaacgaactcgtttttccggataacctaaaaatacatattatggcttaaacccgccataatatgtatttttctgttaatcctcaaagccaacccgttcgactacgcactcttgttttaaacgtgctgcttcgaactgccttttccggttaacctaaaaatacatactatggcttaaacccgccataatatgtatttttctgttaatcctcaaagccaacccgttcgactgcgcactctatagtatttccccgttgcttttaatgactttttggtaccagtagaaactgtcttttggatagcggtttagttctctttcttctgtttcgtcgcgatccacgtagacgaagccatagcgtttttgatagccgtttgtccaacttaataaatctgtgaagctccatgtcgtgtaaccgatgaccgaaacgccatcggtaatagcttcgtggatggcttgaacgtgcgcctttaaaaaggcaatccgatagtcgtcgtgcacttgcccgccttctttcaaggtgtcataagcccctaaaccgttctcagtaattaagaccggcagtccataacggctctcaatacgtctgagtgcgattcggagtccttctgggtcgatattccaatcccagtcagtttgttgcatataggggttatcagcggtcttgtagacgcctggcaacccacttgcttggctagtgccctttttaccggaagtattttgcttggtcaagccaacgccaccttctaatggattagtcgtaaccgtcatcgtctgatagtaattcaaccccataaaatcgggatgtgcgagtggatcggctaataaagcttggtccgcttcagtaatttcgggtgcaatcccgtttcgttcgagataagtcatcactaatttcggataacggccccaagcataaacgtccatccacaaatcagcgttaatttgttcggcattatcagccgcaatttgattttctgggtccgcattcagcgcataagttgggctgtaggcaaaactaggtccgatgcccccttgatagcctttttcatggaataatttaatcgcactagcattggcaaggtttgccatatgattagcttgataagttcgcttagcatcagtcactgctggcggatgctccgctgttaaatagccgtgagtgatgaagacattttgttcgttcaaggtaacccaatgttgcacacgatcgccgaagcgttcgaacaataagcctgcgtagttggtaaaatcttcaataatttgacgcgattcccaaccgccatattcggcttgcaacgcttgcggtaagtcccaatgataaatcgtcacgattggttcaatatcattggcaattaatgtattaattaaacgatcataaaaggctaagcccgcctcattcacagcgcctttaccatttggtaagacccgtggccatgaaatcgaaaaacgataggctttgagcccagcgcgtgccattagcgccacgtcttcttcgaaacggtgatagtgatccaccgctacatcaccattcgtggctttgaacgttttgcctggaatgcggacaaattcatcccacacagaacggcccttaccatcttcttggtaggccccttcaatttgataggccgcagaagctgaaccccacaaaaaatctttaggaaatggtgctaattgatggtattccattactggtcatcctactttctctcaaagtcattgcttattgttctgcttgatatgctttttcgatttgtttcaacattttcttaaagccgcgtttacgcatgaaacccatgacaaaggccatcaacatatcattggtttgttgtaatttgccatttgctttggcattttcgcgatagatgacttcaatagactgcggtccattcgcgaaaatatcgtaacttgattgatagctcccccgggtagaagtcgtttcgtagtgatagctctgatctttaatcagttgcgtaatcttcagtgtcgcccgattcttgccaaattgcttgtcgtacgaataattaggcaactgcgcttcagttagtttatccccagtttgttgcttaatatcaaacaacactgattccagaatcttctgataaaaataactagctggcatttttaaatttaatttaatttccatcccgttcccactcttctcttcaatgtgccatttgttgcttttaactaaaaagagctcgaacaaaagtcattttgtcctagcccttttgttcattagccaaactttaatcgactggtacaccggccatcttcttgtaaacgtcaacgacttcgcctgctaaatcgcggaaagtaattgcgttcatcaagtgatcttgtgagtgaaccgtcaataatgtcacttgcatgtgatcgccacttgcttctttggttaacatatctgtttgtgaattatgggcttctgataaagcggcatccgcttctgcaagtttggcagctgctgtttcgaagtcacctttcttagcggccatgattgcttccattgagctactcttggcgttcccaccgttgataattaatcccatgattgcttctaagttctgttcttctgccatagtatggcacctcctatgatcatctcatcgtgaaccactttcgtaaccattcattaattggtctagatatttcttcgagaatgactaaccaatccattaaaaggctttcaaaaattagttcctgattgtgagagttcgccactatcgcattttacgaagcgaaagaaaacccttacttatattgtaatcgcttcctaagatttgtcaattaattactgataaccttttcacaaacggactagtccaaaaaaaagaaaccttaacaggttgttaaggtttctcgctcaatctggattagaccactagtcattatttttcttatggtagcccttattcttttgatttcgtttacggtttttcttatgttttggttttaatggtgcagctggctgttggcgaactggtactaatttggctttgcgcgcgcttgtcgtcggcgtagccttttgtacttgtccttctgttgcttcaccagtagttggtacagcagatgttgctttcgttgcagcaactggtgctactttaggcgtcactggtttttcggcttccaaatgatcaccaaccaaataacgggtcacaagatcatattcaggcgccaataacttacgcaaattccgcccatcgtgttgattgcccaacgtcaaaacagtcccggtgcgtcccatccgaccagtccgaccagcacgatgaatgtaagtgatttttgcgtttggtacatcaaaattaatcacataaggtaagtcggtgatatccaagccacggccagccacgtccgttgctagtaagagttgaatcttaccttcacggaaatctttgagcgctttttggcgttctgtttggcgaccttgccctgagagtgcggcatacgttactttttgatgttttaacgtttgtgcagcttgtaagagttgcgcggattggttaaaaatgaccaaacctctaaaattcttttgatgtgctaaatggcgtaagacgttcactttttgagcgttaccagttgggataaatgcatgcaacacttccccacccgtcttatcaatcccacgcacgtcgattgtttcgattggcacgccgaaccatgtttccaactctaataagatatcggttgatgtcgctgaaaagaagccaagttgcacatcggcaggtgattcttgcacgatatggcgggtttctgaaagcccgctatccgtcaataattcgtcagcttcgtccataataatcgcttggagtgtatggaatttcactttccgttgttcgctcaattctaataaccgaccagtcgttgccacgataatctctggtttggccttaagccgttcgatttggcgtttaacattcgccttccccgtaatcgcttggacattacagtcgattgccttggcataaggttgaatgacgtcccgtgtttggatcaccaattcctgtgaaggggccaaaattaagacttgtagcccttcgcccggcataattttttctaataacggcaatgaaaacgcgagggttttcccagaacccgtgggtgccagtcctagaattgattggtcttttttcagtggttgataaactgcctcttggatgggtgacatttctgtaaatccttgttcatcccatagtgcttgaaatagtggtgaaacgctcatgtattgcctccgtcatgttaatctgcatcaaatgttattccggccgactgtcttaattgatataaaacttggttgaccgattcacttagctgtaataattcatgataccgttttgtgtcacgattagcaatcatcgccgcgaaattttctgcctcagcaaccattggattagcaagtgattgttcccctagtgactcaatcttttgcccaccttcgctgtagcggtcaacactgccgattgtgccggcattatcgaggacaatcgtcgtttggccaccataaatttcagacgttagataggaatcaacggttttgccaaaaatcaacgtgacgttaaaggttggataacgcagtgttgcgacccctttaccatccactccagttggtaacaattcagcttgataatcgactgaatcgggcacaccaaaccagctgacggcatcatagacgacatacacgccgagatcttgtaaagctcctccagaaaaatgtggtgagaaaatattcggttcttcacccgctaaaacagcgtcatagcgtgatgaatatttcatatagctcaaggtcgcgccattgatcgccggtaatgcgttgatggcttgttgtacaatcttaaagttggcctcatgaatatgacgtgctgcttcgaataagaattggtctggatgttgctttaataatgtttgcatggctgccatttcagccggattactgaaggcaggtttttccacgatgacatttttacccgctaaaattgcttgcttcgcttgttcaaagtgcagactattaggtgatgcaatgtagacggtttcaaattcattggcattcataaacccgtctaagtcagtgtaacttgtggcttctggtgcgtgatacttcgttttaaattggtcggctttatctgccgtccgtgaataaacagctgttaacttaaatgattcagattcccgggccgcatcaacaaattgtcccgtaatccagttagtcccaataatcccaagtgtttgcattataatcagctcccttatttaatactgccagtatacgggatttagatctagaagcctatcgaaaagtttttctactgataagaattccgccactattcacttctttaaccattccttaaaaaaacagtcgtaagtccgataattaattgtccgcaaactaactatttcgtggtagaataatagtaagttggggtgtgacttatgcgattttttaaatttcaaaaaccacaagcaattttaaatcaaaccattcaccagtatcagcaaaaagttcggacgactcaagcgagtaaagtagcgactttttatgctggacactggtcttttaatgacaaccaaacccgaaaaaaacacacattagaaattacaccgaacttgttggtgcaaatcgatcataagccattgagtggtcaagtcatttccctcacggaaaacgaattggtctttctcgatcactacggctatcaattaaaaattacttgtgaaaatcaacggcccgtttcaatttacgatgaagccgaagatatggattatccaatcgaatagctattaaaaaaggcccataatgctcagcgttatgggcctttttagttattctttatttgttcaacattttttgagctttatctgggacttcgtttttggcaaccttttcccatgaaaccacacccttatttttattgacgattaatttgaggtacgcatttcgtttaagcggcgttgatttattaccattaaaatcaacttttttggtaacaccatcttcattgtaggctgcttgttgatagttataatcgataaccgtttcccctgctgaatccttttcttccattcgtgttccgtttgaaacaatctgtgtatagtaggcttccccaccgtaataatagctatgaattccccaactaccaccgatgaaaaccaccacgattgcgattaataataaccagcctttgtgtttaatcattattttctctccgtttctatttaatagtctgccattgttgcttggtgccagtaaaaactgctaactgatagttcgtctgattatcactgtttggaatctgactagccattgtgtattgccagaacccgttcttagtcgccaatgttggctgttcccgcgtagtttgccacaatggatagtctcctttgtgtggcacataccgttttaataagctgggtgcaccaccaatgagacaattttgatgataatgttgattaatcaaggtcactagttgcgccagtgccatttgcgttttcttttgtgcgggcggttgttgtgcatagtcgttataataatccaaatagatcataattggtaaatcacccgtctggctgccaactgctttaaaaagttggtcagcttggcgttcaggcgaactatcaaaactaaaaaaatgaaagatgcccacgcgtaagccagtgccacttgctcgactgtaattggtgtcgaaattatcatccttgtaactggccccttcagttgcttttaaataaacaaactgaataccgtccttttttaacccgtcaaaatcttggtaaccatctgactgacttacttgcatccctagaatcggatattgcgtcgcgcttggtcgatccgaacggtgtttcaaccaccagatagcaccaccaagacacagagctaccgcgataatgccgataattatttgtcgccaatagcgcttttggaaactgtcttgaaaaatcggcgtcacttttcgtctcatccacggttcctccatttccagccttagtacgcttagtttactatcttcatgcattcgagacaagccacctaacaattttgttcgttactgtcacttagagttgccttttattggtaatcagatacaatgtgaacaaagggaggcggaatatgttagatgaacgcttagtggggttaacgtttactttacaggatgctaaatcaaccggcaccgttaatttttttggcatcttatatcattaccgtgtcgaaggaccagctagcgctggcttactcgtcatggtaacggccgtcacacctttagctttaatcgtgacagcgcaccacaatattctggcgtattaagccagacaaaagggagtttttattatgggtattttcatcagtattttagtcattcttgttttagttattgttgcagtcaccctcttttcatcatttgctttgattcataccggggaagttgggattttggaacgcttaggggtctacgttaaaacgcttgatcctggtttccatttggtcattccattcatttatcacatcacagaaatcgttaatatgaaacaaatccccttaaaagtcgctgaacaagaagtcattaccaaagacaacgtggttgttatgatttcggaaacgattaaatatcacatcactgacgtcaatgcgtacgtttataaaaataaagattccgttctaagtatggtccaagacacccgtgcacaattacgtgggattattgggaacatggacttgaacgatgttttaaatggcaccgaaaaaattaaccaaaccctttttgaacaacttagcgaagtaacagccggctacggcttaaacgttgatcgggtcaatatcgattcaattcaagtggctcacgacatccaagaatcaatgaataaattgctccgtgcttcgcgtgaaaaagaagccaatattatggaagccgaagggctcaaagccgccgcaatccgtaaagctgaagggttaaaagaagcgaatattctagaagccgaagccaataaacaaacacaaattttggaagctgaagggaaagctcaaagtgaacgaacaattgccgaagctgttaaagatcaaattaatttgatcaacgccagcttagtcaataacggcgaactctatcttcaatataagaatattgaagcgatggaacacatcgcagacggtcaaaataacaccattgtcttgccaaataagtcaatcgatagcttgggtaatttgccagcaattggtgctctagttcaaaaagaaagtaccaagcattctaattaatgagtgccaataaaaaaggccccagaataacaaccttactgctattctggggctttttttattggtcttctgaaggtgttgaatccttaggtgttggttgtgcattgcgggtgttctttttgctgagaatgtactgttctaacaaggccacaatctgttgattctgtggtagatcagagtgttgtgcttggtcacctgtcaccgtaatttcggtgtagtgcttgacttgtccttgataaatgtactttcccgcctctacactacgcgcgggtacaatcccatcattttcaaagttttccgttcccgcaattgaatacatcgataagttcgtcggaatatttttacgtttcttaatgaaatccgtcagcatctgtgacttatgcgtaatcgacgtttcggaaaagttatacggcgaaccaatcgtcatcaacttcttcactgtaatatcatcgcgattaaaataatcttctaaaaaagctgtataaattaagccaccattggaatggccaaccgctttaaagttattaaattgatacttcttagtcaacgcggtaaatgcgagcgaaaaccatttagcttgcttttgaatattactataaccgtccttattgttttcaaaaccaaccacgataaacggttcattatcccgcggtttaatttcccctgaatagctaatctgattattttcatgcacagttagttttaacaagctgtgccgattcccgcggttagcgttcaatttagccactaattcatcaaaccgattttgggttgcactactccctggaataaaaattaccggtgacattcgtgaatcatgacgcttagctaaggtcgtcacgctctggcgactccattgagcagctggccacattaatccgccgattaaggccaaactaatgactaacaaccagaggcttttttttcttaatttggccaatttatgccgccccctttacaagtgctaattgatctgccaattggacaaacggcttgtagatcatcacgccgacgacaacgtttaataccgtcaccgccagcgcgactaaattaccgttggtgcccatgaacgcttgcaataagccgggggtcccaagtggaaccgtgaagactaccgatggcatgagattcaatgcaactgctgccgatgcaatccccatatttaccagtggtaccaataagaatggaatcacatacaagccatttccaatgacaggcattcccacaaggaccgcgctattaaagttaaataaaacgggcaacagcgaccatcgaccaatcaaatgataatccctttgtttgctgaagatgaaaacggcaatcactaaggctaatgtcccacccgtcccgccaatcgcaccaaagggttcatacaaagtccctaacgtgaacggatatggaacgtgccaagccgtgtgatgactaaatgcatagtttaagttggccgaagatgcgattccctcacgcccaaattgggccaatgttggcatactcgttaatccaaaaaaagttaagctagtggccgctaaaccagtccccaacgtgaaaagcagacccgtttgatttgcttttagtgattgtaatcgtaagatgacttgatctggcaagattgaaatcgccaaccaatttagcaggacactcagccctaaaatgacgccgagcaccaataaaatcgcccacatagaatccaatgaacgtcctaccgctgacccattcagcggtaaatcgcgccgatgaggtcgtcctaattttttgaaggctaatccagtcagatagccgactaataggccaaaaaataagccccccattcccaacatctggctattgaaagataagccctcatttggcgtcaaccgtaacgctaagattaaataggcaatgagccccgtaatgctggctaattgttcatcacgcttatagtgtttggctgtatagcgcgccgcacacatcgctgctaatgccgcaacgattcctaacgtcaaactcgtaatgctgtcaaacatcatctgaaagatattccgtttactcaaccaattcgaaagatgaaatacattcacaccaaaactattccggttaaaaagtgctagctggatgagttggctgatactcccaatcaagacaaatggaaataacaacgttaaacttcgctgcataatctgatagaccgccgcggattggaatcggttaaaatgttgcgctaagcgcatcattatagattgttttttgacattcatgcgttaaccctctaaacatgttttgataatttcattctagccgaccttccgcttaaatgcacgtctgaacgcaaaaaacgggtcgctactttccatctctggataataacgacccgctaaaacgtgcgccataagccatcttcttccggttagctacatcagtcaaatcaccaactttgttggtaattcgcctgattaggctatactcagaagttaaccgccacaaacgcactctattttaatactaatttagtgacactttcgacgtgtagcgtttgtgggaacatgtcgactggttgtgtgctttctgcttggtagccttgggctgccaatagttctaaatcacgcgccaatgttgctggattacagctgacatagaccatcttggctggttttaattgaccaacggcttcaatgaagctagtttccaaccctttacgtggtgggtcaacaatcaaagcatcgacttttaagtcatctgcttgccattgcgccatcacttcttcggctttaccgagtgtaaattcaacgttttcgatgccgttaatcttggcattgtgccgcgcatccataacagctgattcaacaacttcaacaccgtaaacttgcttagcatgtttagcgactgctaatgaaatcgtcccaatccctgaataagcatcaatgactgtttcgttccccgttaattcagcagcttcgattgccttattatacaagacttccgtttgcactgggttcacttggtagaatgattgggctgaaatttcgaacttcaagcccattaattcatcacgaataaagtcgcggccagcgattaattttgtttcgtcaccaaagatgacgttcgtttgagcagcattgacgttttgcatgatgctgaccacttctggtaaagcttttttgatttcaacggcgatttcacgggcagccggtaatttcttactccgcgtgatgaagacaatcatcatttcgtggctgtaataaccgcggcgaaccataatggtcttcaaaacacccttatgcgtatcttcgttgtatggatcaatgtagaaacgacgcaagatatcacgaatgaccttgatagcttcatcaatcttaggatcttgaatgtagaagtcttccattggcatcacttgatgactgtgtttccggtagaaaccagttgttaaagcaccatcgataaaccgaacaggaacttgcgccttgttccggtaacctgttggatcatccatccctaaaacaggttgcactggaatatctaaatgggctttttggaagacgttcaagacttggttacgcttgaaatctaattgggctgggtatgccaagtgttgtaatggcgcaatcccagtttgtgagtaaatgttagcttttgattcaacgcggtctgggcttttcttcaataaattaactaagcgcgcaaaaccatattgtttattgacctttgtgacttggatttctgcttgttcatcgggcaaaacgccttcgataaacaacggatagttgtcgactttagcgacacccatgccttcataggttaaatccataatatcaaccgtcaatgtttcattttttcttacaggtgcttgtattttcatagttacctctttttaattgtgtaaaaagagtctgagacaaaactgagttttgcttcggactcttttcttagctacaagtgtgcggtcaatccgcccacgttatccaatgttccagtttaacctattttaccatcgccgtctatgtcttcttcagaaattgcttcgacttcctttacgaataaatcttcggcagactgctgagtaggggtttctgatgtaatagcgtgatctggaatatcttccttattcacatacatctcgatatgttgttgcaagttagtaaaggtcattggtgcatcgccaccgtattcgccatctaaattaatcatcatcttaacgtcatcatcaccaggacgcgcaactagttttgacgtcttggtataaatgacccgtggatcattaacgtgtttgccacctttaatgacgagtgcgattaaatggactaattcggccatgttggctgtcttaaccacaatcaatgagaaattaccatcattcagttgtgcatccggcgcaatctgttcaaatccaccaactgaattggttaaaccgagtaagaatagggaagcttccccatcatacgtaccttcatcatattccagatgcatcttaatcggtttaatttggggtaacatctcagcaccttttacgacatacgcgagatagccaaaaattgacttaaagtctgaggggacttcataggtcaattcggttagcaaaccaccaccagcaatgttcatgaagtaattgtcattggcttgaccgatatccatcttaagcgtttggttcttcaaaatcacgcgggctgcttcaaccggattatcacgcggaatcttcaaagcccgagcataatcgtttgttgtcccagccggaatgacggccatcattgggcgtttttccaagccggcaatgccgttgacgacttcattaattgtcccatcaccgccagcggcaacgattaaatcgaagtccgcctttgctgctcttgtggcctctttttgcgctgaagcttcttcaggcgttgtttgaaaagcactcgcttcataacccgcttgttccaaaatatccagaatatcagcgacactacgtttcatcacttcatgtcctgaagttggattataaattaaccgtgcacgtttttgcattcgaatctcctaaaatatcaattatcgtttgttcaattcggccatcaacaagtcattgacaactttcggattagcttgaccccgtgtttccttcataatcttaccgactaagaacccaactgcgcggtctttaccgttcttgaaatcgtcaattgattgttggttgtcatctaaaatacctgtgatgattggtgtcaacttagcagggtctgataattggaccatgcctttagcttcaacccaggcttttggatccgtgtcattttggataatttcttggaagactttcttagcaatcttcgatgaaataatcccgtctttaatcaaattgatcatttgggctaagtgggcaggtgtgagggctgtctcttgaaggtcaatttgtttgtcgttcaagtaagcattcacttcacccatcaaccagttagaaacttgttttggtgcggcgccatcagcaacagctgcttcaaagaagtcagacatttccttggtgttcgtcaagacacccgcatcgtattcaggcaagcccaattcatccacatagcgtgcacgccgtttagccggcatttcaggcatattgtcttgaacttcttgtaaccaatcatcaccaatgtgtaatggtggtagatctggttctgggaaataacgatagtcatccgcaccggtcttaacccgcataaggaatgtttcgcctgttttttcgtcaaaacgacgggtttcagggcgcactgtttcgccagcaatcaaaagttgtgattgacgcttgatttcataagctaaccccaaacggacgtgattaaaggagttcaagttcttcaattctgatttcacaccatattgcttcgcaccgattggtcgcacagaaatgttagtatctacccgcattgaaccttcttccatcttaacgtcagatgcgccagtaaattgaacaatttggcgtaacgtttcaaggtaagcataggcttcttcaggcgttgacatatcaggttttgaaacaatttcaatcaaggcagtcccttgacggtttaaatcgacatatgaatagccgtctgaaccatgggtattcttcccggcatcttcttcaacgtgcaattcagcaatcccgatttgctttgtatggccatcgacttcgacttcgatatagccatctttaccaaggggttgttcgtattgtgtgatttggtaagcttttggattatctggatagaagtaattcttccggtcgaaatgcgtatcgcgcgcaatatcagcgtgcaaggcagtcgcaaccatcatcccaagtgtgtatgcccctttattcaaggttggcaatgtcccaggataaccccagtcaatcacattcgtgttagtattcggttctgcaccatagtttacaggagatggactgtacatttttgaattggtttttaattcaatatgcacttcaagtccgattgttgtttcgaaattcattaggcttttcctcctttgaagcttggaacgttcttgttaaattgagttgcttgttcaaaggcataacctgcgcgataaacagattcttcatcaaatgctttcccaataatttgtaaaccaactggcatgccatctactaagccggcaggcactgacattgctggtaagccagccatgttagcaggaattgttaagatatcgttcatatacattgtcactggatctgatactttgcgacccaagtcaaaagcggtggttggtgttgttggtccaaccactaagtcgtagtctgcgaaaactttttcaaagtcgcgcacgattaatgtccgcacttgaccagccttcttgaagtaagcatcgtaaaagcctgatgaaagggcaaacgtccctaacataatccgccgtttcacttcatcaccgaaaccttcagaacgtgatttaacatacacatcttcaagtgtcttggcttcaggtgaacgataaccataacgaatcccgtcaaaacgtgacaagttagatgaagcttcacttgaagccataatgtagtaagtttggacggcatacttagaatttggcaagctgacttcgtcaacggttgcccctaatgatttcaaagtttcaatggctgtttcgatttgggctttaacgcctggttcgacaccttctgccatgtattctttggcaacagcaatcttcatacctttgatgtcaccatttaaagcggcacggaaatcaggcactgggatatcagcactcgtactatctttttcatcatgaccactgatggcttgtaaaacagtcgcattatcagcaactgtccgactaaagaccccaacttgatcaagacttgaagcaaaagcgatcgcaccccagcgtgacacacggccgtatgttggtttgatgccgacaatcccattaaatgcagctggttggcgaattgagccacccgtatctgtccctaaagaagcaacgacttcaccggccgcaactgctgctgcagaaccacctgatgaaccaccaggtactttgtctaagttccaagggttctttgtcttcttgaaggctgatgtttctgttgatgaacccattgcgaattcatccatgttgtttttaccgatcacaattgcatctttagcttttaatttttcaacaaccgttgcatcaaaaaccggcgtgaaattttcaagcatcttgctggcagcagtagttgttaagccatctgttaataagttatctttaatcccaattggcatcccagctaataagttatctgcatcaattggttgggcgtccactttggcagccgcagcttgtgcaccagcttcatcgattgctaaaaaagcatcaacttgtggttctctcttgtcaatttcagcaactgtttcagttaccaattggctagcagttaagtcaccagccactaatttggcatggatactttgtaaatcttcatataagtagttcacggctagtcttcctccttatccataatggcagggactttcaataagccgtccgctgaatctggtgcattcttcattaaaatctcgcgatctgtgccagcttgagccacatcttcgcggacaatattttgaaggttattcacgtgggtcgtcactgggacacccgttgtatcaactttatttaattcatcagtcattttcatgatgtctgcaagttgttcagtaaattgttctaactcagcatcgctaaaagctagttttgaaagttctgcgacatgctgaacttgtgttttatcaatcatgagtaaacccctcttctaattctgtcacttttatccattctgattaattttaccatatattaacgtataagaaagtgacatcccttgaaatttaccagtttttcctaatctttaccggtttcagcagatattgaaatatatttttactttctttttaaaagcgtaattgaatgttatgcaattcattagaaggcgatatgatttataagagtttatcatataaacgaattcgtttaatcttatatactgaatacagataagaagttgtgaataatgtacaagattatcattaacttatagatgagtgttataatatgaaaatcaatatctcggaacaccttgtagcagtagcagttttaagtttaatgggtggcattgtcttacaaagtacgaccgtttcagcagcgaccacttcggttggtgtaactatcactggtgtaacacctggaatggccgctaaagccaaagaagcagccgcagaacaatccgctttagaagaagcatggttacaaacagaaatcgatgacagcgaacctgtagaagttaccgaaacaattggcggtcaaacaactcactactgggaatcagcagatggctcacgaagcacaactgccgccgcggaagttcaagacgaaacagtagccgcaccggaagtagcacctgaacaatttgaagaaacagcagttgaagaagaccaaccagccgaaaacttcaaaccaatgcctaagaaacatgacatcgatcaaaaagcagttgctttcaaacaactcacaacagattgggctagcaatcaaatcatgtcatcattggaagacttaatcactaaggctttccaacttaacaaataacactcagtattagctaagcggcaagtatcgtaaccaagcgtccccagttttgagtagtttcaaaagcaacactcaatagtctgtcggtgtaacttacggatttacccatactagaagttactaaactatttagaattgtttttttcctattttaaacgtttataaccactccactgctaaaataatttcattaaagtttgatgagttcacccaaaattttgggtgaatttttttattgcttaatgatttttcaaaaataagtctaattttaatagacatttcacaacttatttcatgctcataaaagaacccaaacctactgatagaagcaacttaattgattatcgggctgtattatcggtatccagtctgaactcccttcatgtaattttcatttacggcagactctggctagcctgattacagcagaacacctcaataggtgttatactcttaataacatctttttaaaaggagtctatcatgaaaaaatcagtccgtttaagcaatgccgtccacctgatgaccctgattgctttaaacccgtttgataacctttctagtcagcgcattgctaaaagcatcaatactaacccctcttttattcgccaaatcatggggcaacttaagacagctggcctattgacgagcgttaagggccatgccgaacccaaactaacgaaagctcctgaccaaatttcgctctgtgatatctataaagccgtcgatgatacccggttattgaacatcgatacccaaattgatcctagttgcggccccggacaaaatattcaattatcgcttgctacctattacgatcaaatccaagaaactgctgaacagcaaatgcaagccatcaaactagccgacattatcgaacaatatcaacaacgtctcgttgaaaatccagaattaaaactttacgaaaactaacacacaaaaaggttgggcaaattgcccaacctttttgtgtgttaatcctcagcggatacccggctgatgccgcactcttttcttttaaacgtgctctatcagccaaccgcttccggttaaccctgaatggcaaacaatcgctaacccggttattcaccattctgtgttaatcctcagcggatatccggctgatgccgcactcttttagatttgctagtacctttactaagtcatacttaactgcaataccgcggtccattaattcacgtggcacaatcgcatctttgggattaacggtgatatatgttgcttgtggattttggtacgtcagattcataaacggttccttaataaacatcggtgtcatcatacccacacctagttctaaatagaccgtttttttaccttcagctttttgaataaattgacgatactttgcgtattgcttgttgtagtgttgtccttcaaggaattcataaccacggacccattccaacatttcagcaccacatttagggcaccgcggaattaagttttcgggtaaatggccattttcaatttgcggaaataattgatcaacaactgtctgattaggatagacttgatcatgacatttatcggcacattgaaaataggaccagtcaccctgaatcgtggcgacatctttatctggaaaagctttcgagaattgcacgtcttgattcgtcgttatcaaatcatagtctctatcctttaaaatggctttcaagtcctgatacggttggtaaactggttcatgtaaaacaaaatgaattaaagacagcttaaagccccataaatcgccgggattataccaatcagggccagccgcagccgacataccggctgcgcctcccacgatgacgtagtccgcctctttaatcgtcgtagccattttttgtagtgttgcttgatagtctgaattagtcatttttgaggagctccttaaaattatcatcgattgatccagcaaggccgattgaccgttgttcaatggctgcgggaatattgatttcgtgcggtaaattcaacgtgatgtaacggtaacttagactttgcgccaccaattgcatgaggagcgccttaattaactgattattagcaccaattcctaattccagaatcaccacgttttgtgaacggtacttttgaacaaatgcgttaaacttagcttgttgcttttgaatcatcggcattggattttgattgttaccaaaattaccttccacttcaaaaatccgttcttcgtcaaatccactcagttgaaaatgcatgttgccatttgatgtgacaacaaagtattcatgatcgcccaccaactgctttaaatcgcgaaagacaggtgtactttcatagtgatcaaccatataatcgaacaatactttgtaaaatgcatctctttcagccactgttggatagttgtaaaaagccccttgaagaatattcataatcccgtagcgttcataaaaagtcccaaagtgggtcataaacgcttcgtcgtgtgcaaaaatattgtaaccttccgtaattgatagcccgttaccagcactaataatgacggcatccgcattgtctagccaattccgtgctgttttaaactcgttcatgatgctctcttttggtgtaataaataaaataacaacaatatcgcatattgtacactgttatttttaaaattacaaccactgacttttaaaggtccaaaaaaatagcgtcgacaactgcgttagttgtcgacgctatttttttgcctatcagtcataactgactgttgtcgcactctttaattaataactcccgaatacgtgggttgagaaccttttactgccggctgctcggcctacgtaagcttgcatcccctctgcagacgagattgaaatatctaatggaatattttgtggtaaatatttatcagcagcggttgcaatgtattgtgtgaaactcatgatttctgtttcactgtagaattgtgtattaacggtgatgttcatcccagccaatacaccatcttcatagtgtgcttgagccgtgacaccactcaagttcgggaagaaagtttggacttgttctttaaaactagtaaacgcgtccgcatcactttgattgaccgctttttcatcattaacgagtgggaaaacttggttggcttggttcattttgtgccatgaatcaatcgttgtactaccgtttttgctgaccccataagcgaagaaggttccgcccactaaactatccttaggtgcttgtttgtaaagccccaccacgatggttgtcttactcaaaccttttttctgccgtaaacgcgttaagaccttattggccatttgtttaccttgttgcgccatcatggcactagaaattttggtttcaaaagtagcaccatattgttccttggtatagtaatccacttgattcatcccaagaccaatactcatcccttcaagcgcaccatctgcccctaagaagtcttgttctaagatttgttggagatacagtggattccgcttatccggttctttttcaccattatcttctggatttaagccaagtgtattatcttttgattgacgtgccaaccatttttgcgcttccgccgttttgatggtttgaccttcttggtagaggtatttatcagtagggaattgttttttagaaatgtttaataagccactttccaaactcttcacatcaaatgccgtgttactttgttgtgtggttaatccacgtgtctgacttgtcttgtattggttattatcaataaccccttcatacatgctgtcagtcactttcccggtcgtttgtagctttttagtcgacttagttgatgatgacgaactcgaattgctttgtaaacttgtacaacctgccaacaataaaaccgttgcggctgcaactacccataatttatactttgccactgaaaatggcctccttataagtcctaattgattcgcttattgcgccaaataactatctaggtctgcttcgttgataattggaatctccaatgcttgcgccttggttaatttactgccgccatcttctccagcaatcaaaatatctgtttttttcgaaactgagccggtcactttagcgccgttatcttcaagttgttgtttcaactcaccgcgggtatattgcgatagtttaccggtcaagacaaccgtttttccgttaaagtaactatcactattttcagcttgtgcctttgtcaccccagtataggtcaggttgacttgcacttcagccaattcacgaattaaagtgtgtacttgatcatcagcaaaataagtcgctaagctatccgcaatcgtctcgccaatcgtatcaaccgacataatttcttcttgatcactggccatcaaagcctccatcgtcaagaaatgttccgctaataaacgggctgctttggcaccaacatggcgaatccctaatccaaataataacctttctagcgaattctggcgactagcttcaattgcatttaacaaattattaatagatttttctttaaacttatccagttgcgcaagttgatcggccgttaagcggtataaatcggcaacatcatggaccaatccttgatccaataattgggcaataatccgtggacctaagccgtcaatattcatcgcatttctggaagcaaaatgcgttaactgttccttcacttgtgccggacacattgggttaatacaccgcaatgcaacttcttcatccaaatgaaccaattcatgaccacacgaaggacattctgtcggaatcacatacggttgactgtcagccggccgtttagccagtactacttgtgaaatttctggaatgatgtcgcccgctttgtgtaataaaaccgtgtccaacaaacggacatctttatcacgtaacatatcagcgttatgcaatgaggcgcgcgcgactgttgtaccagccaactggacaggatccatcacagcggttggcgtgacaacccctgtccgaccaattgtccattcgatgtcacgaacaatggttgccgcttcttcaggcgggaatttataagcaatctcccaccgtggcactttaaccgtattaccgagttggcgttgtaaagctaagtcgttaacttttaacacaaccccatcgatgccgtattctaagtcatcccgcgttgcttgatagcgctcgataaaggtctttacctctgtcatattatgacaaacttcagcggttggattgacgttaaagccgagttctgcaagcacttcaagcgcttcgtgctgggttgtcgcttgcacatcgtcaaaggtgacaatcgtgtacataaaggcactcaaattccgctcagccgctattttggcatctaattgccgtaaactaccagcagccgcattccgcgggtttgcaaatggcggttggccttctgcttcccgtttttcatttaatgccgcaaaagaggctttgggcatgtaacattcaccacggacctcaatagagactggcttggttaatgtttgcggaatcgccttgatggtcttaagattctgggtaatgtcctccccaatcgtcccattgcctcgcgtcgcaccacggacaaattgccctttttcatagatcaagtcaatcgcgagtccatcaatttttaattcgacattatattcgatggcatgctcaacgtttttttgaagtcgattatcaaaagtcgcgagttcttcctcagaaaaaacatcgcccattgataacatcggtacttcatgcgtcactttcttaaagccaggcagaacttgatcaccgactttttgagtgggcgagtcattagtaacaatgattggaaaggccgcttctaacgtttctaagtcgcgatacaattcatcgtacacgtgatcttcaaccactggggcatctttggtgtaataggcttcgctgtattcagctaatgtctggcggagttcttgggccgccgctgccgcttcagtttgcgtatattgatcgatcggtttagctaatcccataatgaagactcctcactgtttatgatttgaaacgtgctttttaaagctgactcttgtgcttagcttcgtattgcaaacgaccgactttgtcggtcattcacaacactgtgctaatgctcagagtcaaatccgctttaaacacactctgttttgaaacgtgctttttggttgcaacaacttccgcttagcgctactcgtcaaacaactgcttgcagcagttattcgccgagttgtgctaatcctcagaagataaccgtcggaaacgcactctattctactttttcaattggtgcgaagcttgctagtagtcttttaacgccttgttctttgaaggcgatatctagttcttggtcgttgccggtcccgttgaccttgacaactgtgccaatgccccacttcttgtgttggactttttggccggctgtccaagcaccgctgttatcgccaccagttgtgtcggcaatcttgtgactcgtcgttgttttatttgcattatacgttgtagccgttgcgcgtgcataacgattgctcttaccaaatggcacattgcgttctggaatactgccagcattgccatttgcgtaatccaataatttatcatcgatttcgccgacaaatcgggacgcttggttactttgttgacggccgtataacatccgtgaataagcgttggttaagtacaatttgctttcagcacgggtaatcccaacatatgccaaacggcgttcttcttccagttcgtcttcttctaataaagcacgtgatagtgggaagatgccttcttccatccccatcaagaaaacaactgggaattcaagtcctttagcagcatgcaaggtcatcatggtcacttcactggcttcttcttcgactgaatctaaatcagagaccaatgataattcggctaagaagtccacaaataaatcactgtcatcttcttctggttcataatgttcgtcgaattgtttggtaactgagagtaattcttcaatattttctaaacgactttgcgcttcgagggtgttttcaacttcgagcgcttttttgtagccagtcttatccaataattgttccgttaattccgtcacgtttaaaaattcgcgcatcttcgctaagtcaccaatgacgttgccaaaatcgatcaacgtcttgcgactcttacctggaatggttgagagttccgcattttgcgctgcttcaagtaatgaccattgatgatcatccgcgaattgcgttaatttttcgagagtgccggggccaattccccgtttcggactgttaacaacccgttcaaaactcattgaatcagacgcattcacgactaggcgtaagtaagccaagatatccttgatttctttacgatcgtagaacttatgcccgccgaccatcttgtatggcatgttggctttgacaaacgcttcttcaattgaccgtgattgggcatttgtccggtataaaatggcaaagtcgccgaatttacgttggttcttttgcatttcttcttggatcttcgtaatgacaaagagtgcttcgtcacgttcactttgaccccgataataagtaattggttggccttcgttattttcagtccacaattccttaggtttacgatattgattattgttaatcacaccgttggctgcttctagaatcgttttggttgaacggtaattttgttccaacatcactgatttagcatctggataatcatgttcgaagttcatgatgttgtccatgttagcgccccgccaaccataaatactctgatcggcatccccaacaacacagagattcttgtatttctcagctaacatgttaaccaatgtgtattgcgcttcattggtatcttggtattcatcaacgtggatgtattggaatttttcttgatagtgttcaagcgttggtttgttttctttaaataagcggatcgtttgcatgattaaatcatcgaaatcgagcgcttgattttgttggagtcgtttttgatattcggtgtagcattgggccacaattttttcgaatggtccgtttgctagacccgcatagtcgcttggtgtttggagttcatttttggcgttactaatcgtgcctaaaatcgcctttggttcaaacttcttcgtgtcgatgtttaaatcccgacaaacatggcgcattaacgtcaattgttcagaaggatccgcgattgtaaacgcgcgattgtagccaatttgttcaatctcccgacgtaaaatccgcacacaaagggcatggaaggtagatacccaaacatcttgagccccttcgccgagtaagttaccgacccgttcacgcatttcacgcgccgctttattcgtaaacgtaatcgccagcacgcgccatggtaaaacgtgcttttcttcaattaaataagcgacccgatgcgttaacacccgggtcttcccactaccagcacccgccatgattaaaagtgggccttctgttgtgaggaccgcttcagcttgcttatcgttcatcccttgtaacaattctttttcagacaaattagtcatccttccgtaaatgcaatcagcctatattataccaaactagataggtagaaaaaagcgaacacgacctagtaaaacggattctaatttttcgcaatcttctgccttgacctgggacgcgtttcataaattatactcaccttaatccaagaaaggtggtatgcatcatgattaaatacattttttctaacttagacggtacattgttaaaccaagacggacagctttctgaaaaagatattgcggctgtcaaagcaagcccaatcccaatttccttgatttctgcgcgttcaccacaagaaatgcaagctacgattgatcagttagcgttaacgacaccccaagtcgcttttaacggggggttaatttatcaaccgacagatcttttcccaatggttttagcagaatatccacttgcaacctctgctgtcgcaacattaattgccgcattacaatctgaatttagtgacatcagtttaagtgcgtatgacttacaccactggtacacgcagacaattgacgctggtattgaggcaatcgctaagcaaaccggtcaattgccgacgctcatcaattttagtgatcaattgcaaaatccatttctcaagcttttcaaaattcaactgattatgcaaacgacacaacaacgggcaactgttgctgatttcatcaaccaatgccacttgcctggtctttcagtacaacaatcaggtacaatgaccttagaaattacgagtcatgaagccactaaagctaacgcattaaccaccatcttagaaaacactggactaacagtcgctgattgcaccgcgtttggtgaaggtcaaaacgacttagccatgttatcgctagttggccaccccatcgtcatgggcaatgccagtgatcaaatccagatggcgggtcaattcattacgaagactaatcatcacagtggcttcagctatggtctaaagaaatacattactaaagttaatcaaaaagtaggttaggcttatgccaacaattcgtgatattgcccgcaaaagcggctattcggtttcgaccgtctcccgtgtgttaaatcatcaaaaatacgtctctgaacctgccaaaacggcaatcgaagcggtcattaaacaactcgattacgtgcctaatagcttagcgcgcgatttaagcttcggtcaaaataaaaatattggggtcgtcctaccgcacaatgaccatccgtatttcaaccaactcttaaacgggattatggatgctgcgttttcaagcggctatcacgttgtgctcctaccttccgaatataatcaagcagtcgaactagattatctcgaacaattaaaacgtaagaattttaccgcactcatttttacttcacatggtattgcactctcagtcttagcagagtacacgcgttatggtcaaattgtctgttgtgaagacccggggacccatcatatctcggccgtttattctcaccgtgagcccgcctatttagcggcattcaagtaccttaaagcccacaaagcacagcaaattggtctactattaagtcgtaatttagcgcaaagcccgacctggattgccgtcacgaacgcttatcaacaagttttcaactgccaacctgattccgagttaatggtcggtggcatgcgctcatttgaagatggctatcgcgccgctgaacaactggttgaaaaacagccaaccctcgcttgctattttacaaatggcgacgacattgccgctggtgtccgccaatatcatctggatcatcaactgccgaccccgcttttaattggtcaagaaaaacaattatccagttttttattgcaactgccaacaattgaccatcacttcttcaccctagggcaaaaagcgtttgaagtcgccctcagtaaccatcaccaagtttgtcgtttcgaatcagaatttattttgccataaaaaagccaccttaacctaacttttaggctaaggtggctttttatgtcggatgcttatgcaaacacccgatcaaaaattgtttgaacttgttttaagtgccattggtaatcaaaggcgtcgtctaaatcggcttttgaaagttcactcgtcactttcggatcggcttctaataattggcggaaatctttttgttcatcccatgctaaggctgtcttcggttggaccaaatcataggctgcttcacggctcagacccgcatccactaacttcaacaagacacgttggctgtaaattaaaccatgggtgatgttcatgtcagccttcatcttttcagggaagaccgtcaacgtcttcacaatccgcgtgaagcgattcaagatgtagtccaataaaatcgtagtatcgggtaaaataatccgttcagctgagctatgtgagatatcgcgttcgtgccataatgacacatcttccatcccggtaatcacatgaccgcgaatcacacgggctaagccactaacgttttcagaactaattggattgcgtttatgcggcatcgctgatgagcctttttgacctttagcaaagaattcttccacttcgcggacttctgttcgttgtaaatgccggatttcagtcgcaaaatgttcgattgaggtcgccacgaccgccatcgtgttaatgtaatcagcatgtagatctcgtgggagcacttgcgttgaaatatcttgggcccggatccctaagtgttctgtcacataggcttcaatttcaggcggaatattggcgaaagtcccaactgcaccactgattttaccggcttcaacgccttttgctgcgcgttcgaaacggtcttgattgcgtttcatttcagcataccaggttgctagttttaacccaaacgtcgttggttcagcatgcacgccatgcgtccgcccaatcatcacggtattttggtattcgtaagctttatcttttagaacagccataaaattggcgatatcagcccggattaaatcgttcgcttgtttcaaaatatacccttgtgctgtatcaacaacgtccgttgaagttagaccatagtggacccactttttttcatccgctaaggattctgaaacggcacgggtgaatgcgaccacatcatggtgtgtgatggcttctaagcgattgacttctgccaaatcaaagctagcattcgcgcgaattttctgcgcatcctctgtgggaatatcgcctaattttgcccacgcttcgacagctagaatttcaacttccaaccaagcttgataccgattttccgttgtccaaatggcgcccatttcgggacgtgtataacgttctaacataaacttctcctccaaatactacctaaatgctggtgatggtaaaacgtgctttttgtggcatctttctgtgcttaaccaaatttgccaaattcgcgattgcatcaccaactcgtcaaatccagttaatgctcaaaagataaccgccacaaatgcactctgttttgaaacgtgctccatcgggcatctttctgcggctagctacgtccgtccaacgatcgactgcgtcgctcattcgccggcctatgctagtcctcaaaagataaccgcccgctgtcgcactctaatataagtctgccgcttcgtaattatcgattaagggttggatggcttgtccggttgctgtgaccgatccaatctgttgattggtcgtgacgttgtgcaaattaaagtaccaatccggtttgatcttcatctgtgtttgaattaatgaccgttgtgcttcttgaatccctaaggtcatccccgcattattgaggcgtgatgggccgactgccaactgacagatggccttcaaatgatattcatattgcgagaaattcaaggtatgtgtcaagacatcgcccgttgcgtgcggtgttggcataattcgtttcacataaatattcatagcgggtgttaaaaagaattcaaccccaaaaacacctgtatagtccaatttttccccaattaagtgggctaatcgattaatttcagtcgcaacatcttgattaatccgtgctggcacaagcgacattttcaagcgatgatcttcaaactcattttcgatgactggcagtgtcacacacttaccatcttcagttttaacgaccatcactgatagttcttgtgcgtcgggaatccaagattccaaaatataagtccccaactcaagggcagcttcaatgttttcaaggtcactcggttgttgaataaaacgttgatactgcttaccgtaacctttttgaatgggctttaagatacatggatatccgattgaatcgattgcatcttgaatatcatctacatcaacaactgtcgcatagggcggaatattgatatttaaatcactcaaaaagactttttcgaggtaccgatcttgcgtcacagacaacacattactgccttgaggtagataataatgttgtgccagttgttcgagcaccgtctcatctaataattcattcgtataggtcaacacttgactgacttcaccgagttggactaatgtttgataatcattgaattcaccatcgatctgactatcaattaaacgtgcaaatgaggtattttgcatctgcggggtcacaatcgcggctgcccgataccccatttcttttgctttgagcgccaacatataggcccgttgatcatttccaataattccgatggtttgtcctggataaataactggcatcatattacctgctttcctgttcaccaaactgtatacccttattatagcgaatttaagcgttgtctgcctaatactttcctccatgataacaaatttttagacaaaaaaagagtgcctatcagcactccgttaaataacatttatttattttcgtctaaaaagacgacttgaccgtcttcaaacgctgcaattcgtgctaaagattccacttgaatgccgcgttgatctaacaattcgcgccctttttggaaagtcttttcgatgacaatcccgacaccttcaagttgtgcgccggcttcttcaataatagaaagtaagccttcaaccgcttgcccgttggctaagaaatcatcaatcactaaaacgcgatcgtctgcattcagaaacttcttcgaaattgaaatgtggttattcactttcttcgtgtatgaataaaccgttgcgctatacatgttatcttgtaacgttaaactcttgtgctttcttgcaaaaacaatgggaacgtggaatgctaagcccgcgaaaacagcgggcgcaatgccagatgattcaaccgttaggattttagtaatcttcttatccttaaataagcgttggaattcttcacccattgcagccattaaatctggatccacttggtgatttaagaagttatcgaccttcaatacgtcttgacctaatacttgaccatcttttttaatgcgttcctctaatagtcgcacgctgagctctcctttgtagcatcgttaaacatcactaccgatagtagtaacgactaataatgttttctgaaattgaattaaaaatagattaccacaaaaaaagcaacacaacaagctcaaatccagttattcagcgatttgaaaagagcctgtcacaaaccggaatttgtggcaatctcttttgagattaattagtagcagatttcccatgatttgtttcatagcattctttattgatcatattggtcgaggtggtaagccttaacgagctcaattaacttcgctggataatcagggtcagtcgcatagccgtcttgttgtaaagcatgggcagcttgctcataattagtggccgcgattacgtgtgcatactgcgtccggttccaagaggtcccataagcaaacaattgtacatggtcaagcatcgattcttgataattgttatatactctaaaacgcgctgttgtcgttacccactgaccatttaaatattccttggtcgtcatttccttagtgttggcctcattatcacccttaataccgaaataattatggtattgcgcagcaagtgagctcttcccccaatcactttctaaaatggcttgcgctaaagtaatacttggtaaaacatgatatttcgtctgtaattcttgggcatatggcaccatttttttaataaacgcttgcttcttagcttggcgcgattgttgttcctgtctggcttgatcggcaagttcttcttgggccttttgtccattataccgaactaataaaacgagcccaattccgagaataaatagactcactaaaacgaccactagccaatcggttgggtggcgtctcttcttagaatagtagttagctgttggtttgcgttttgtcgtcttgcgtttacgtttttttgccaatcctctgcctcaactttatctgaatctattctatattgtacacaaattcattcagaacaccaatctttaatttgtaacccccctttaatttctatttagcgcttttattgctataatattggctgtaaccgattacgatagtaaaggactgattttattgacaacgcttaactggggaattatcggcttaggcaatatcgccaatagtttcgcaacttattttaaccaacctgatggtcacatttatggggctgcttctcgttcactcgataaggcacaagcctttgccgaccaatacaatattccacatgcattcggtagttatgccgacatgctcggtgatgacaacatcgacatcgtctacattgcaaccccccacaattatcacttcgaaagcattatggcgagtcttgaagccggtaaacacgtcttctgtgaaaaagcgattacgatgaaccgccgcgaactcaatgcagcaaaggctcttgctaacgaaaagcacttgatattagctgaagcaatgaccatttatcacatgccattgtttgctgagattgaacgccaacaagtcgctaatcacttaggcgctttaaaatcaattcaagtctcttttggaagttataaagagcttgatccaaacaatcgcttcttcagtcccgcacttgccggcggtgcaatgcttgatattggtgtttatgccctctcatttgcacgtcggatgttaactgctaaaccagaacttgtagcgacgcaatgggtgccatcagaatccggtgttgatcagcaatcaacattacttttaaataatgccaagcatgaaatggtgactgttaccttaaacattcatgcgaagatgcctaaacaaggtgttctcgtttatgaaaatggctatgtcaccgttgacgattatccacggcctgacaaagccaccctcactttcccagatggtcgcgttgagaccattcaagcgggtgacgcaaccaacgcaatgaactatgaactccatgatttccaagaaacagtgcgcggaaatcaatcaaacgataccctcgaattatcaagcgatgtcatggacatcatgtcagacgcacgtgctgaatggggctttgtctatccatttgaaaaacgcactgatctcgattaacccattcaaaaaacctggccaatttggtcaggtttttttagagtattttagcgagaaccaccatatcttttaggcgaatcccattttcatagattggcgtttgatattggtcgaagaagtttttgcgaatttgttcgaaccgaaagccttgacgcaaataaaaaccaatcgctgccaaactaccgtccccagtgccaactagcaatgattgaaacccttggtcaattgcaatcgtctgaatttgagtcatcatttgcccaccgaatcctcgatgctgccattctggccgtaccgcaatatttttaagttctacctgctgattgttgagtgccatcagatggaagaccccgatgacttgctgctgatcgcttacggtgtaaaattgcccatgcatcaaatagcgttcaatcatgccgacttcttcatccgctaacaatagatcatccagccactgtcgccgtgctgcgccctcaatcaattgatacgttaacatctccagctcaccacccaatcaaaaaaggggtcgcgacaaaattgcttttgccgcgacccctaggttaatttttaaattagtttttgtttacgttaacagcttgtgggccgcggtcgctttcttcgatatcgaaagaaacgctttgaccttcttcaagagtcttgtagccttcaccttggatagctgagaaatgtacgaatacatcactaccatcttcgcgagttacaaagccgtaacctttttctgcgttaaaccattttacagttccgttttccatgagaaaaatcctccttgtgtcgatgacacattataaatttgtgtatttctggtggtccgatggaagaaagttcttttggaaacattcgtaccgcaaccattcaaaaagtacaaacatagtgtaacacaggcaacaaccattggcaaccatttggcaataaaaataaaccgttttctatcgcggacaatcagcatctgtgtttttagacaagtattattttatatgttgaatcatgccctaaataatttggctttttgctttaattacgctaagatagcagtataactttttctcattggagtgcttgcttatgctaaaactattgaaacggctattaccaattatcttcatcggggtaagcctagccgcttgccaaaaaccgatggatactaaacatcaactccaagccgatatgcaaaccgttgaaaatgcgactaagcaacaacgaacagctctttcaaccctcgaaacaatcggcgatccagttcctgataactatctcacgattcaaaaaaaatatcccgacgaaaatctattaacgattgaagatactaagattgcgacgactgcggccaagcgcgaagcagcctttcaaagtcttaaagaacaacaagctgtgctcaaaccggtcattaaacgcctcaccaaactggtcaagcaagaaaacgatgaattgccgattgaacaagtcaaagatttaaatcaaagtcttaagatttcgacacttgattatacaaccttggccaccttctacaacgcggccactaaagtatctgatgaattttacagcgaccatacagatgctgatgcagacgaagacagtcttaaatcaccaatcaatcgtttaaatcaatattacagttcagtttatcaacaagccgaaattgctaaggtcaacatgaacacagttgctgcgcatgctaagaaagtgcaaaaacaactggaataaacaaaaaaggagttggacaaagtcacgtttgtccaactccttttttcaatctttaattattcaacccgtggcggaccacaatcgtcggctgtagctacccgcacttgttattgcgtccgtttaaaccgcatgagtggtgttgcgactagtggtgtcaccacagctgctaaggttgcttccattacagcatttaacgcaacaacgccaagcatcacgatgattaaatgggtcggatcagtatgatacatccctgccgcttggtgtccgtaaagcacacgcgttaagccaatcactaaaatggtattgattaaagccccgaaaatcccagctaaagccattgcaccggttttacgaattttagtttgatataagtgttggaacgtaaagccagcaatcatcccagccatcaaccgcggtaaaatagcgataattggattttgaaagattaaaagtgaaagcggatcgcctggagaggtataggctctaaataatgaaatcaaaccccaaattaatcctagaatcgccccttggcgtgtgcccaggatcacggccccaataatgaccgttaaatgaattgttgttacggctggtagcccaggaatgatattaatataaccgaccatcggaataaaactttgaatgattaaaaaagcggttaaaatcgccataatactaatcgtataagctgatgaatttttatgtgtcatcctaactgactcctaaactgaatttattgctcattatagcgatttgtcaccctagtttcaatcatttacatcaagggacaaaaaaaggtaattccaattggaattacctaactgaattatgatgcgggtgagaagactcgaacttccaccgggaaaattcccgacaagatccttaatcttgcgcgtctgccattccgccacacccgcgtaacttgctttatcactttaagccacgtacattagtataagagaaacgatgattgaagtcaattaaaattttactttggagacgattacatgcccattatccccgctaaactaaccgatattgccaaattaaccaccctgtatcaacaattaacgactgaaatgcatgtgctacaacccactaattaccaagctgattacacgcctgagttctttgactggcaacaaatgataactgatccactacaagcagtctttgttcatcaaaaccaagatgcgcaaatcgatgccttttgtcacgttacaacagcccaaacaagtccctcacccttgtttatcgcacaccgctttgcttatctcacaacactgtatgttgcaccagaggcacgccgccaccacgtcgctacacaactgctatcgtccgcaaagcaatggcaacaaacacaagcgctcgattatttagaactaaccgtgttagggaataatccggctgcgttggccctctatcagaagctgggctacaccactcagaatcaaactttacgcgccaactaaaaaaaggccacccctaaacataggggtggcctttttttattgaatttgtgtggtttgataaatcagtcgtccatgacaccgccgacaaacatagcgagccgtattcattcgacggcgacgtggatagacttgcccacagtctgaacatttataaatcacaattttgctcgatttagctgtcttttgtgcagctggtgcatagcgcgcacccccgacttgtgcaagtaattgtttaaactctgcgtctcgatgacggtaaccgcgatgcaacagatgcaggtgataatggcaaagctcatgcttaatcaccccttctaaggtctgtgtatcatgttcggtcaacatctttggattgatatcgatatgatgatcctgtaaatgatagcgcccgccggttgtttttaaacgccgattgaaatttgcttgatgcacaaacggccgattaaaaaactgcaacgataaccgttcaatcaattcagttaaggcttgatcagtcatttgcctttggcgctttcattgtcagttgtacgcgttcacgttcttgatcaacactcatcacccaaacctgaacgacgtcgccaactgccacttcatcagaaggatgtttaacaaagtggtttgccagttgagaaatgtgcactaagccatcgtgtttcacaccaatatcgacaaaggccccaaaatcaatcacgttgcggactgtgccttctaacgccatattcggtttcaaatccgccaaggttaagacatcatgacgtaacaatggcgccgtcatctgatcccgtaaatcacgccctggtttttgcaaactacttaagatgtcggtgattgtttcaatcccgacctctaattcagccgctagagccggtacttgcatttgtgcaatcgccgtcttcaacgcatcgcttcctaaagcatcaacggttaacccaaatgatttcaaaatggctttagccgttggataactttctggatggatatcagtattatcgagtggattgtccccattaataatccgcaagaatccgaccgattgttcataagctttaggccctaagcgtggtactttcttcaaagcactccgcttttgataaaggccgttttcattgcgatattgcacaatgttttgagcagtagttgctgacaaccctgagatatgttgtagcagctgagggctagccgtattcaggttgactcccacactattcacgacatcctcaatcactgtatcgagttgcacagtgagctctttttgcgccacatcgtgttgatattgtccaacccccactgcttgtggatcaatcttgatcaattcagctaacggatcttgcaaacgacgggcaatactaatcgcacttcgttcttcaacgtgtaaatctggaaattctgcccgtgctgcatcactcgcagaataaacagaagcccccgcttcattgacaatcacatagaaaatttcccgggaaatagatttcaaacacgtcgttacgaattcttctgattcacgactcgcagtcccattaccgattgcaatcatttcaacttgatatttctcgagtaaagcagtgaattcatccgccgcttttgatcgtttgtcagctgaagctggtttgtgtgggtaaatgactaacttatccaagaattttccagtgccatcgacaacggctaatttacacccagtccgataagcgggatcaaagcctaatacaactttacccttcaatggtggttgcaacaagagatgcttcaagttatcaccaaagacactaatcgcttgttgatcagctttctcctttaattgcttgcgtaattcacgctcaattgccggtccaataaaccgcttataggcatcttcaaccgcagacttgatgaccattgctgacgctgaatcttgtccatacaacagatcttggctgatccgactggcaattacttgatcgtcaatcataattttagctttcaaaataccttcgttttcaccacgattaatcgctaaatattgatgttccgctaccttcgttaaatcggcagtgaaatcataatagatttgataaacttgcttctcatcggctgcttcgtctttaacttgactggccaactgaccattttgccaagtatattggcgcacccaattccgatattttgctgtttcactaatattttccgccaagatttcatgaacaccagctaaaacagcagctgtatcattgattttttgatctggattgaggtaagcttcagcttttgccaataatgcttgttcggttaagctaggtaaccctgcgataaactgcgcaaaaggttccaggccggcttctttagcgatggttgctttggtccgtcgtttttgtttatagggtaagtacagatcctctaaagcttgcagttgcgttgccgtttcaatttgttgtttgagttttggcgttaatttttcttgttcagcgatatttttcaaaatatcggttttacgtttttcgagcgtcgttaagtattgaaatgtgctttcaatttcatgaatttgaacttcatcgaggcttcccgttcgttcttttcgataccgcgcaacaaacggtacggtattgccttcttctaaaagacctaacgttgctttgatttgttgtggtcgatactgtgttaattgttgaatcacaagattttgaatatcaggcatctgattgcactccttttgcttcaattaaaaaaacagcccccgacttgggaactgtcaactttcgccctaagcgattcttgaaatattttggatgtatttagaaatccgttccgttgctttgtcttgattcatttctgaagctgcaaaagcttgcatatcaacggtttgatcatcatgcatgcttgtaattaaatcttcacagccttgaatgaaatcagcgtaagcaccgattaaacgttggttgttccccatcaaacgagcgggcgcaacaactgttttgaattgtgctaagaattcgtgatattgatcaacaccatctctgaagatttgtgctgtcttttgatagtcttgttcgctcatttcggctaacttaccatcagcaacggctgcttttaaaggggtgaaatacttactcatcccttcttgtactttttcagtattatcgattaaatcgttgacagcttggccgtatttggcaagcttttgttgcgttttattcatgtccatcctcctagtttcctatggtttagtatactaatttcccaatcggcttgcaattaaaatattaaagcatgtgtcattaatagaaaaggcatgcttagttcatcaaaggacatttacctcattaaaaaaacgctagcgacaaaatctcgtttgtcactagcgtcgattattacctatcttctcttcaacattctactcgtccacgactgaccaaacattaactttgtcaataagtcgatacaagcgaaaataactaaataaagtaagaaactcaacaaccaattattttgaacgtgagtaatccgttccagaccaccaaagatgaaaagtgatatcagaaactgtaagaatatttgcatacgtaatcctccttacaaaactcactaacataaaagttatttaaccacctttattatagtttaattgacaagcactttacaaggttggcaacaaattatttagccattctccgctgaaagaacttcacaatttccacaatcacaatcaatgagaatgaggctgctaggacaattccccattggtgaatatcgagatgtgacacgtggaataggccgtttaagccaggtaccataatcgttgcggctaacaggaggaatgaagctaagacagcccagttgaaagctttattcttgaaaaagccaactgtaaagattgattggtgcactgacttcacgttaaacgcgtggaagagttgaatcatccctaacgttgcataggccatcgttaacgcatcagcatgtgctaagccgctcgcttgatgcactgggtacgtaatcgctagggcatacacaccaagcgtaatcccaccttctaagagaccttgatagataatcgcttggaagacaccgccggagaagaagtttgacttgcgcccacgtggtttttgattcataatccccggttcagtgggctcaacccccaacgcaatcgctgggaatgtatccgtcactaagttaatccataagatgtgcaccggttgcagaatttgccagcctaaaatcgtcatcatgaataaggtaaggacttcacctaggttagctgacaataaatattgaattgatttttgaatgttggcaaagactttacgaccttctttaacagccacgacaatcgttgagaagttatcatcggcaagcaccatatcactggcgccttttgatacttctgtcccggtaatccccatcccaatcccgatatctgcggacttcaaggctggcgcatcattgacaccatccccggtcatcgcaacgactttaccatgtttttgccaagctttaacaatccgcaccttatgttctggcgcaactcgcgcataaactgcgtactgactgacttttttagcaaatgtctcgtcatccatttgatccagttcggcacctgtcacaacggccgcatccgcatcttgttcaggtgtaataatccctaaacgaagggcgatggcttctgcagtatcccggtgatcaccggtaatcattaacgtccgaatccctgctgaatgcgcatcagttacagcttgtttggcttctggtcgttctggatcaatcatcccgactaaaccagcaaagattaactcatcttcaatcgtcggatcaattgttgctggtaagctatctaacggtttatacgctaatgccaagacacgtaacgcttgtttagctaaatcgtggtttgttttgagtagaaattgccgttcatcttcatctaacggttgaacatcgccattggcatcaataaaatgactcacgcgtttgagtaattcatccggtgcacccttagtggtcattaataattgaccatctttggcttgatgaatcgttgtcatcagcttccgttctgaatcaaacggtacttcacccacgcgtggtgctgctgctagggcatcttggatcacgaaacctttatcacgcccataagcaattaaagccgtttccgttggatcaccaattaactggccatcctctgtgattttcgtatcgttggcaaggttcataatgcttaacgctaaatcatcgcttgccaagtcggctgatgcttcttgcaactgattattggtaaaaatcttttctaccgtcatttgattcatcgttaacgtcccagttttatcggacgcaataatgtcggtactccccagtgtttccacagcaggtaacttccgtaccaacgcatttcgtttaaccatcttctgtgtcccaagggctaaaataaccgtcacaattgccggtaatccttctggaattgcggcaaccgctaacgagattgaggttaataacatattaattggtgattgcgcgtggcgtaagtagccgaccacaaatacaacagccgcaatgattaaaatcataatcgttaaactcttaccaagttgacttaaattcatttgcaatggtgttgtggtttcaccagcttgatttaacatcccagcaattttaccaacttcagtttgcatcccagtgcccgtcacaaccccgacaccacgaccgtaagtcacattactattcatgaatgccatgttggtccgatcgccaatcccactttcaggatcggttaacgttgcaacagtcttatcgaccggtaccgattcacccgtcaaagccgattcctcaatcttcaaagccgctgattctaacaagcgtaaatcagctgggacgatatcgcccgcttctaatagcacgatatcaccgacaaccagttcttcactcttgattttaacaatctgcccgttacggcgtacatgtgcgtccggggttgccatctcttttaaagcatcaattgcttgttccgctttggcttcttggaaaacaccaaaaacggcattcaagataacaacggcgagaataataatcgcatctggccattcatgtgcaaaaaagccggcaatcattgccgctactaataagacgataatcatgaaatctttgaactgttctaaaaaacgaacgaacaagctttttcgtttagtctcagtcaactgattacgcccgtatttagcgagtcgttcagcaactttgtcttgcgttagcccatcagttgttgtggctaaactttttaaagtctcatccgttgattgggtaaagaatgaacttggttgatctgtcattgtcgtgcctcctatagatagatttcggggtaaaaaaagagacctatagagaattcaaagaatcccccataagtctcactaattaagataacaccagaatattgccttgttggtggcgttatcgcagacaagctgccagttactcccttatcgttaaactaattataagacagaaccaatctaaaacgcaagtaaaacattattctgacgtccaattaatttagcggataaacaaaatccagccgattaacgccaaaatgtatcaaaaacagtaattggtaaatgccgcttgtgcgctgtcttttggtaccacttttcaatcttggtagcagcctcttctgccacttcacgaccctctaaataatcatcaatttgatcataagtgacaccgagtgctaattcatctggcaatgctgggcggtcttcttcaagatcggcggttggaatcttttcgtaaaggtgttttggtgcctttaattccgccagcatcgctttgccttgacgcttatctaatctgaaaatcggtacgagatcagcaccaccatcaccgaacttcgtatagaaaccggtaattgattcagcagaatgatccgtgcctaaaaccgcacccttcatttcaccagcgataccgtattgcgcaatcatccgcacacgtgccttgatattacctttattaaaatcactgactgtcacttctgtttccgccagtgcttgaaccattgcatccactgacgctttgatattcacacgccgcacctgatctgcttgcatgaaatcaatggcagccgttgcatccgattcgtctgcctgttcaccatatggtaatcgaacagcgatgaattgataagtttcatcacccgtttcagcacgcatctcacggaccgcttgttcagctaaagcaccgactaatgttgaatcttggccaccagaaatcccgaggacgtatgtttttaaaaatgtattcttttttaaataatcttttagaaaatcaactgaccgtcgaatttccgctttcggatcaattgtaggttgggtctttaaggctgcgataatttcagcttgtaaaggtctcatgattaaataccaccttttttaaatgttagattgctaacttttttgaaacgcgcttccttcaacagctttgtccggcaaataagcgctagcgcacttattcaccagacttcactatactcaaaagctaaccgttgaatgaaccactctgcttagagcgcactctgattttggacttcttctttgactcttctgatttgggccattttgtgatcccatgtgcgttgtgaaaggtcaactgggtaatcttgcgggttcaagtcccgcttgtattcatcccataacgagtcgagattttcactacagaacttcttaatcgcgccaagttcgggcaatttgtaaacgcgttgcccgtgttcaaaaatcgtccgtagaattggccgcgcattaaagtccgtcacagttttattaatgtacgtgtaatttgggtggaacatataaattgaatcttgttccagtggatcttcatcccaaagcgtaatgtaatccccttcagatttaccatcaacttttttagtgattcgccaaacttgcttgcgccctggtgtggaaactttctcaacattacttgaaagcttgatggtatcgaccatctttccgtcgccgttttcaatcgaaacaagcttatagacagcccctagcgcgggttgatcataagccgtaatcaatttcgtgccgacaccccaaacatcaattttggcttcttgcatcttcaagttttggatggtcttttcatctaaatcatttgaagcgtaaactttagcatcggtaaaaccggcttcgtccaattgttggcgcacgcgttttgaaatataggccatgtcgccactatcaatccgcaccccttggaagttaatcttgctaccaaattcctgagcgacccgaatcgcacttggcacaccacttttgagagtgtcatacgtatccaccaagaaaacacaatcatgatgcgtttcagcataagcgcggaatgcttcataatcattgcgatagacttgcacgagtgaatgcgcatgcgtcccactggctggaatcccaaaaatctttgaagcacgtacgttacttgtagcgtcaaaaccgccgatataagctgcccgagtgccccataaggcagcgtccagttcttgggcacggcgcgtcccgaattccaaaacaggatccttaccgaccacagatttaatccgtgcagctttcgtagcgattagtgtttgataattgatgatgtttaacaaggccgtttcaattaactgacattgcgccaatggtccttcgatttgtaaaatcggttctttcccaaaaacaagctcaccttcaacggctgaacgaatcgttaaatcaaaatctaattctgctagatacgtcaaaaaatcctcaggatagccgacttcatcccgtaaataagctaaatcactctcggtaaagcggagattctcaagataattaacgatatgttctaagccagcaaaaatagcatacccattttcaaaaggtagttttctgaaatagcattcgaaaaccgctgtccgattatggagtccctttttaaaataagttaacatcatattgagctgatacaagtctgtatgtaacaacaaactatcatcaggatataatttttgcatgtcgcactcctaattagagatatatttggtatacttagttgaagctattatacaataaaacagcgagttctgcataatttcgagaaggagttttacaaatgcaatttccgacagtctcagttttaaatattccttttatcaatactactaaccaagcgtttattgcgcaactttcaaaagacttagccgctaacgaaaaccgatttatcgttactgctaatccagagattgccctctatgctactaaaaataccgattacttccaaacgattagccaagccgattacattacaccagacgggattggtattcttaaaggcgccacaatgttaggtacaccacttaccgaacgaattaccggttttgatacgatgacagccttattcgaaattgccaatcaaaatagctatagcgtttatttgcttggggctaaggaagaagttttacaagccgcttgccaaaacgttgcaaaccaatatcctaacgtcactatcgtcggccaacataacggttattttgacgaccaagaagaacaaaagattgttgccgatatcgaacggacacaacctaatatcatcttagcagcactcggcttccccaaacaagaaacctttatcgcagctaatcgtcacaaagttaacgccatttggatgggcgttggtggtagcttcgatgttttatcgggaactgtgagccgggccccaaaaatctggcaaaaaatgcacttagaatggttctatcgctttgcatcacatccaagtcgcttgaaccgtttcccagcgcttattgaatacatgcgcttggttaaaaaagaaaagaaaaactaaaaaaagcattgaagacaaacttaattttgccttcaatgcttttttattttgataatcgttttaatgttcggctgtactgaattttttctaaatagtaccgtctcacattaccgtcactcagcaagatgcccagaaactggagtcccttaccaattgatttcgtttttttaacagtgctcaataaattaatattagcgttaaagcggtctttttggtgttgatcgtaaaaccctttttcagttaggtaagcttccagtttcgctttgattgcttcatcgttcgctgttaatctaaacacagtcgtctgacgtaaaaagccagaaattagaaaggtttttaacatgtcactttgagtcatactgttttgtctaatccgataacgcatcaacggttcattagtcacacctatttgctgacccgccgcgatcattcgtaaccacaaatcataatcttcacaggcgattagttgttcctgatagccaccaactgtttcaaaagctgcttttttacccagaacactcggatgaacaatgaaattatcatattgtaataactcacgaacggcagctgctgattcaaccatttgtggatgccgaccaatctcggcattagcttcatcaatcagaatcgaagatgatgcaataacatccaattgccgttgttgcaataaatcaaattcagtcattagccgttctggcacagcaatatcatcagcatccattcgcgcaatgtaatcaccccgacttgctttcaatccccaattcaaactaggtgctagccctagattatgctcgttgctgattaaaacaattcgcggttcttcttttgcatattcatttaaaacagctgccaatgcttgattatcaggattatccaaaacaatgatgaactcaaaattttgataagattgtttcagaattgattcaattgactgacgtaattccgtttctttttcattataaacggccatcacaatactaattaacggtgtttccatagtaatctccttgttgacgcctacaattgtgcatacaaatcatgcatcaaaatcgctaactggcgtgttgaaaatgattgactaacatgcttattaaacgctaagcccatgccaactaattggttattttgataagcagcgtaagcttcatttaacgctttgacatagccttgtaagtctaagctatccacaacccagccatattcagggctatccacaattaccttgctatcaccaacatcggtcgtaatcgcagggacgccataattgccagattctaacaagacggttgggaacccttcgtgaattgacgataaaactgataaatcggtgtgtcgataaaagtgcgccatatctgattgaaagccatcaaaatgaaccttatcagttatttgataatctgttgctaacttcttaaactctgcttctagttcgccatcgccaattaggtgtagttgatattcaaaatcaacatttgctaacgcttctaacaatagctgttggtgtttttgcgctgttagtctagccacacaaatcatcgtgaattgcggttgcttaactggtgtcggtacttccggactaaattcaatggcattaaaaatagttgtcatcttattcgtatcgatgccttgttgtaccaagctgtttctaaaccgttcggcaatcagatagatatgatccgcttttttaagtacccagagacttaacggcaacaaaattttacctttaaaccccttattcagataatcaatcttaggtaatgtgtgcaatgtcaatgtccacttcgccgtaattcgtttccgaattaacgctaagaagagattagaccgtggtccatgcgtatgcacgacatcgatgttttcagaattgatatgcgctgctagttgtttcaagaaatgcggggttaacgtttttggttgttcaaacacttcaaccggtaactgattagcgcgcgctagttctgcaaccggcccatcttcaaaaactaataatgatggctcgtctttaccaagtgcgatcattgccttcattaaaccgataatatgtgagcgaccaccgcccgtttcattccctgcgtttacaaaaagaaccttcacgtaatcaccttttcattctaatttagttttctaaatcttgcttaatttgtgtcgttgaaatacctgttgtccggggaagatagatgacttcacaataatcctttaagaaatcaaactttcctttccaatcatcacccattacgaaaacatcaatatcgtatttttgaacgtctttaattttttgttcccaatctttttcaggaattaccttatcaacatatcgaatggcttcgagaatatatttgcgatgttcatatgaatggtaagcttctttatgcttttcagcattaaattcgtccgttgataagccgacaattaattcatcgcctaattggctggcacgttctaagagatgaacatgtccccaatgtaatagatcaaaggtaccgtaagttaaaacttttgtcattttaaatcatcctttcttaaggcgcatcagatcttgccggacacgtgtatttaatccaactaataatatcacgaataaaagaccaacgataatcgtctgaacgacgagatcgaagaacaaactgccgaggttaattggaatatgcaagccaattaataacgttaagccaaatattagccagtacttccaatgttcatgccacaggaatttaaaatctaagtgccctcgtactaaccaaatccgcatcccacaaaccaataactcggtcaggacaatgatggttgtcccaccattagccccaaagcaaccggcgaatacgaaattcccaattaaggagaagaccgcgccaactaggtatggaatcgcgacaattctgtacatcccttttgatagcgcaaattgattggcataaataccaccataaggaatgatcaccacaagtaaactaacccagaagaagttatccgtcatcgcttgatagcgactaccgaaaaaccaaacgataaatttattagcgttgaccatcagcgcacttgtaaatagcaagccaagtatcaaagtatagtccaacgaaactttcaataaattctgaatttgattttcatccgcttcttcactgtccatcttagccataatcggcattaagacgattgtcaccgaacctaataattgcacaaccgcccgcgccatggtttgcgtctgggcataatacgttaattgaacagaacccgctaataagccaataatggtttgatcaaagctcgtataaaattgtgcagcaactgaaggaatggttaccgtgattgattctttcaaatattgcttagaaaaatgaatccgtccaaacttgaattgaggaatttctgttttaatccctaaccagaagacaaagttagctaggtaagtaatactattgattaatagatagatccaaagatcttgttcactgtgtacgaaaataaaaatcgtagcgactagtgtcaatttaataattgtatttcgcatgaccactgttttaacttggccacgaccaatgtaaaaccaagaaatatccaagacatacccaattaaaaatggaatctcaattagaaaatagaatttataactcatgaataagcagacaaccacaatgtaactaatgatcacgattaaaccactaagaagttgtaaaccccataattttttgaaattttcttcaagattttcttttgtcgattgggcaattactctgacaccaacctggttcattcccatgagaatgataaaactcaagaagactggaatcgagttaacgtaggaattaatccctaacgcttctttgcctaatacccgcgccacgtacggtgtcgtgacaaaaggcagtacaatgatcagcaactgataaacagcattataaatgatatttgttgaggcttttttcatactagactttccaaacttcctgaattattttttgcgtcgccgaaccatcggtattcgcattgtgtaactgattaaacgcttttgtcgtttgcgctgttagcccttgactaagcaatgtatacaacgcttgattgtccgttactaatggccctgggataaaggcttggtagtcaaaataaaagcctcgtagaatatcctggtatttatccaaatcatacgcgtaaaaaacaatcggcttttccaataacgcataatcaaagaaaacagatgaataatcagtcattaaaacatcggcagctagatacaactcttcgatgcttgcgtagcgattgacgttatgcacatgtggataagctgcaatgtctggcatttgatctgccacgtttggatgcaagcgaattaacaagtcatattgatcgcctaattgtgcttcaaattgttccaaatctaacgctaatttaaacgtgggttcatcgtctctaaaagttggtgcatataaaattgttttgcgtgttgcatctaattgcagtttcgcttttaaactagctaccaattcacgatcatctttatgctttgctaaataatcattccgtggtaacccatagctcataatcttagtttgttttaaattaaatgcccgttcatataaccaattatcttcaggtgcattagacacaaagtagtcccagttaaggggttctcttgccgtcaaacgtttgaagtcattatcatctggtaaatcattgccaatatgtttaagtggcgtcccatgccaagtttgcacaaaaaccccatttttatggggttttagacggaatggaaagttaatatccataatccaatatttagcacgcgcaagcgcctttaaataggccttctcgtgtcttgccacgaactgaatgttgatgtccgggtattgggctttaactgtttgtcgcgcttgttcatcgtttaaaacaataatgtagtcactattaggaaacttttcaatcaagccttcaaagagtgctctgggattaccagaaaatgatttcccaaaaaaagaattgataaaaaatgtctcgtctgacgtcggagtgactaatttaatcaaaccaaaccaaacgcggtggtataaaactgctttaactgttgcgatagccgtcatgctttttaagtcctctcgttgtgactaatgcatagcctagtgcaaaggctataataattgtatctgccaaaaagtccattacattaccactaaatgctgataaggcaataatcaaacctgatccaaataacaaactcacttcaaagaacgttactgttttgcctagcacacgaattacttcgtataagcaatatagcagtacaaaaacgtaaggcatgattaataataagacgccgatgaagcccattgaataccattgtgaaatgaagtcttgctccaagttggcaatatggttcatccgagtataagaaatcccgaaccaattatttaatggctcattattaacagatttagcgcggtttaacattgcttcttcaaccttacggtaatttaagcgatcaccaactggccatttcattacttgataccagaattgtggatcatcacgatatgaatacccgcccatcacaaatctagcatttaatgaataatcacgataatgctttttaatatatctcatcaaaggtgtttctttacgatgatcaatttgatcatccttatgttctttctctttttctttttcagcttctaattcttttttcttttctttttgttctttcttagtaccatcttgtgtcttttgaacagccgtatcggttgttgttcggttaaacattggtgacattggtaaaatagcaccaccaaccaacgttaaaactgcaaatgttgcaaataagctaactttgaacttaaattctttaaacaacaaactgtaaattaaatataagatgatataaccagctaatacaacgaagaaccctaatgaagcagttttcgtaccaagcatcagcatcgcaaacatttgaatagttgctagtgcaatactctttagatctagcttttcaaccaaataataaagaaccatcggtgtcaataatacttcgacagctgaaactgcgttggcataatagaaaaagccttttgatgctaagccatagtatgcccattgctgaccgccgccaaaccatgaaaaaatattaccttgaatccagccaccaccatatgatgataagctaattttgaacaagtttgtaattacaatactaccagaaataatccatgctaaaaacttaaccactttattaaactcagctctagtcaccttaacctgtgttgtgacaaacaagacaaccaatggaattaccattctaatccagtagaagatttcccccactgttgagtaacccaagtcgattgggctagttgatttaaagtgtcgtgtaaataccaaatgtaaggctagataaacgacaagaatagccatataaagccaagcaaatcgattcgccttactatgacgactactccaaatgtaaagtcctgcaataatcgctacgagaaaaattctaatcagtgttgctggtgaaaatggcacccaatttgtaactggtggtacgtataaaaagtagatatccaaaaacggttgtagcaacactaataaaattagtgatttttttgtatattctttaaagttcacggacttattcctccaagattaatgattcaaaatatattgatagaacgtgttggctttttcttgattttcctttgaaaacttgttcgttaatttatgcatgcttgataatgccgttatttcttgatagcgttgctcatcaaattgttcgaacaacaccttccccataaggtgcggttcaacgttactcaaccgtggtaactttgcgtattccgcagttaagtgatcacaagcaattgttaaaaagacatgaaacataaaataattatctaacgtatcatgtgtctgccaataattatataataaatctcgcgttaatactaagatagggtggttagtgtcactatgaatgaaccaactcgaagcagcaattgcccgattttgttgttgtgtattgctgtagaaaaagagtggtgcatcaaaaacataacccgggaaattagtccccgtaaaataaactgtactatcaatccaagtgccaccatgtttcgttaacagcgccacccgtactagatcggataggtgcgcataaggaatcaacctcgcatcaattttagcctgcaggaatgttggaaaggtaataaagtcgcttaaatttgctaacgttatgatttgcacctgttgtttgggatatagtctcttaatcgtttcgatattgtgtctgactaatggtggtgcatcttcaatgccttggaaccaacaaatccaaatgatgttatttttttcgctgtttgtcggttgtacttgatattgatcaagaaatgctctggcttctttttttaacttgacatacgttaaggcatctgcaactggcgtttgcttattctttaagtagaagttaataaagcttggagaaagtagggtcgtcacataattcaatctcttttttaaattcattttatcccgcctatttattttgactatcaacttttaaaacttgagaaaacatttctgcgttactattcgtattcttttcaattaagcgccacttagcatatgggactaacttgccccctatggttttaatcttataataccctctgtaactactatcagtagcctgtggatgaactgcccaataatattgattatacggtacttctagatataaacgataatctttaggtgtgttatgtttttcctgataggttataaaatcatttttgatacgactcgcatgcctaattcgtgttgctaagcccgcataaaagataacaaccattaccatcattattctgataattggtaagctaaatttaacagcattcaattcgttgcataaggcaactactagcaaacacaagcagaaataacttgcaaacgctcctcgagggccaaacggtgtaactacaaagaatggcacaattaaaacaatagcagctgcaattaatgcaatatattcgatattgtgggtttccagtgataacttagccatttcaattacaattactaattaagaataaaattgataataaacatgatactaaatagcgatggccgaagtcctttaaaaaggtattaaacaaaatataatgatattctatgaaagcaatcaggatactcaattctagataagaaaccacagtccccaacttattacccgaacgcttttggagatttttaataattaagtaacccagaatgacagcaagcaacactgtaataattggattatcaatcaagagataaaaatccatttgttgtgcaataatatgataaaccttagtcaatgaaaaacttgtttcccggtaactgtcatgatgtaataatatatttaaataagctttattggaaaacattaaaatgccaccaatatatgtgccaatgaaattagcaattactaagtagtttttctttttttggtatagcatatagcccattaaaattgtggcaactgctaaatttaatagtgtaacgtgttcaacaaaaaagcaactgattattgaaagaaccgctattaaaatactataacgtaaatactttgatgcttgccaatcagaataatgatatttcactaagttaacaatgattaaaggataaactagagctgccatatagttaaagaagccagcattccatcccaaaacttgggcgaacaactccgtactcattgttaacattaaaataagtactaataatgtatttctttccaattgcctgacattactgattaagcgtgcacctaaatagacaacaagtgttgtaatacccgcgtaacttaaaactttaaaaatcgtactatggctggccataataattaaactattgcccgcatagcgcccgtcgtaatttaagaatcgacctgatccaaaatagtctcttagggtcgttataccccagtttaaatcatctcccgttagtgggaaattgatggataggtaaccaaaaaaaaataaaaactagcataaaaagtccgtatttttttatcattccatttttttgaactgtcattttaaagcgtcctttcaagtaataaaaccgataatacaattgcatctaacctctattttattactatatgctcttctagagtcattttataatgttttttgccttaaactaaacttctcgtagactattgtccaacctacggcagctaacataataaatgccgggacaatgaaaaatcgatatctagactgaatctcaattaataaatggaccataaaataaccgatgatcatcaattttaataaataaccgtccgtccatgtttcacgccatttgaatactgctaataaggcatttgctacaataaaaatatagaacaaaaactgaaccgcattcaaccaatttttaatctttaaagataacttaacattatctgccatcccccacattagggcatcatcccgagcagtccacatcttcttacttttattgaacattaaattaacgagcttaggtttatcttggattctttccttaataatctctttgcccatcttatctcgttttgcgccaagtggataccgattcattaagattaagtccgttgcagagtagctcccaacggtttcatcattcaaccctaatacaaatttccaagttggatttctattttccagcggatattcggataaatgcgttacttgcaaagcgctattcactaagaacaacatgagaaaataggccaaaacactagtggtaactcttccgagtgattttaaaatatttttccgatccggtgccaataaccattttgtaatttcaaaacagacaagtgcaataatcaacaaaatgcccaatggtcgcatcatattcccgagtgctaataaaacaccagcagttgctttaacccataattgatcatgctttaagtatagatagattgctaaataaattaaaaaagttgctagaaattgattcgttaaaacacctgtcatataaatatacgctggataaaatagcaataacgtatacacaatgcgccctgttatttctttaaagtgtaggttaataatcttatacccaacaaatgcaattccgcaatttagaaggatgttaattatctgtagaataagcacattttgaccaaatattttgatgatcaatgcttgaaaataaacaaagcctaactgataaggccaactttgaaagtaactttcctttagaaatgagaggtcaccttgcgtcgctagtatcgcggcatgatgcatcatttgaaaatcagaactcggtgctgtcgggaccttaatcaaccaaccaattctgactaatatcgccattcccgttacaatcataaagaatatttttttactggttatcttggtcaataaaaccaatgccaagataattaatatgtaaaagacaatagcaacaatcattaatttagaattagataggtaattaccggtgactaaattactgattgagtaatacgtaataaaagcaaaaatgcttaccaaaagtactgtataaacaccctttacaaagccgttcataaatttttgcaccaaagatacctcctaaacataatatttttaattttatcacatattagttcaataatattaaatatcccgttattcttagtattttcacttagattgtcttttttataatcaatgtagttatctttaattagaccattttcatcatatttaaggttcgtgccatcaagcgatccatactcatctatagcaggcatatgcactgtttcacttgaaactccaggaatataaaccgggaaagcattgtaaggatatggaatttcaatttggtcaccgttgccatcaacagggttagctacatcttcaatcgttgtaacgttgttttgaccagataaaggaatcgaaaagtctggatattcactgcccggatcagtcaaatctgaaagccagtatcgtggttgaataatcaccgatttactcgtggtcgatttaacgctttcctttttctcagaaatacttgaactcgattctgaatcagaactctttgaactcgacttactatctgagcttgttgaagtactgcttgtcgattgtgattgcaacgaactggctaatctttcagaaactgagctcgcgccttcaattgcgcttcgtgggttcacaatcttagaagtcgtgttggctgtcaccgtctccttattcacagccaccgctaatgcgctaccaaatgactgtacgattgtagtggttaagaaaataattgctaaaattagatggacgactctcttttgcatatcaaatttcctcccagttctaatgcctttaaaactttgttacatgataatttttcgatattttgactatgttcatcaggcataactttgacggtatcactacttccccctaggctagactcccaagaatgcctatgcaggggtgaatattagtcatctaaccatcattacccaagaacaatatgtaacgatataagaggttcacaactcatgagttgcgacctctattaataattacctttattacataaaatatttgtccgcgaatttttttgaaatttaaatattatgaacaaatccatttaaatgcgattatatcaatgtttagataatatatattttttgaataattacgaaaaataaacttgtatgcccttaaataatggtgtaaactggttttatattaaaggggtcacaactcatgagttatgacctactatcatggattttttaaagtcattacgtctaacttaattttgcttacaaatgttgatataccagtaattaagctggattcagtccaaaacaaaaagcgtcttccaaacattattcgttggtgtctggaagacgcttttttcacccttattgtcctttttgggttgtttctgtggttattggctcgatttggtattctttttcgatattatgggctactcggttgaagcttttcatcatttcgcgccgggtaacaatccctgtgaactccccttcatccgaaatcacaggcagataggggtgatcaactaagagatggagcgtttcttcaatatcatatggatctctaatcgtcacgacatcggtttgcatgacatctttaacggtcagcttccgcaaattttcgaaactgaggttattcaatccgagcatcgtctcggtaattaacggcatcgtcaacatccctttgaacttcgaatggttgtctaagacgggaatgctcgaatatttcaccgtggttagtagaataaacgcatgttccaaggagttgctttcttgaacactcgcaacaacctcaccgggaattaagaagtgttctttattttctaataataagttcgaaaatgcatctgaaatcatcacttggcctccaataaactaatgctacttttagattgtaacaaagagcaaacacaaaagaccatccatagctactaaactttggatagtctttagaattaggcgcgtttaaatgtaaagtgtaactgcgaaacgggttcgaaccgacgattgtagtactggatttgatattggtcaggtgtgacgtctacaacggcgtatgtccctttcaagtcacggaactgcccccgtggttgggcaatgctgccagggttcaagagcagcacaccttcgtgcatttcacaggccaattggtgtgtatgcccatagaacgcgagattagcttggctttcttgggccgctaataaaagccgcattaaatcgccatttacaccatacaagtgcccgtgcgttaagaagattcgttcatttgcaactgggacaacaacttgtgctggaaattgaccattgaaatccatattgccttgcacaacggtcatttggttaaacaagggatcatcggttgttaattcagaatccccgcaatgtaacatggttactggttgatcttgatactgcgccactaactgcacgagaatatcgcgatcaccatgactatcactcacaacaacaaaacgcatactaaacagtcctttcggcgccaaggggcgttgtttttttgaaacgtgcttcttccgacatattcttccggctagctacatcagccaaatctaaacgtgatcctgccgtcgcacgctagtctttgatccattctttccatttatcttctaggttctcaattgcttttgcgcggtggctgattttatttttttgttccaccgtgagttgggccatcgttgcatctaattctggcacgtagaaaagtgggtcatagccgaagccgttatccccacgaggaatacctagaatttggcccttcacgttaccttcaacgactaaatcttcatctggtcggtctggtttagcaaaaaccaatgttgtatggaaggttgcggtccgcttttcagcaggcacacccgttaattcatagagcaacttcgcgttgttgccggcatcgttatgatcaccagagaagcgtgcagaataaattcctggacgaccacctagttcatcaaccattagaccagaatcatctgccaagacaggtaagtgtaagatcgctgcaatttgatccgcctttaggcgagcattttcttcaaatgtcgaaccagtttcatcaatgtttggcaattctgggtaatctaataatgttttgatttgaatcccttccgctgcgaagacggattcgaattcgcgggccttacctggattcttcgtggcaatcacgattgtttgttcatcggtatcagccacttggatattcggttgaacgccgcgttcaaaactggcttgacgttgatcattggttcgcgtcacaccttggctcgcacgtaaaataagttcgttgaattcactactattgactgcttgttgtccgccgagttcaagggcgatgatttgttcctgcggtgtggccaccatcgtcaccaagctagtcgctaggtcgctttccgcggcgtctgggtcaccgagtgactcaccagcgaccatcgctgctgtgacggctgcagcgacttgtttggggcctttgccttttggtaataaggttagtgcgcaataaacagcgttgaagagttctgctaataagccgccaccatcttcaagacaggttacggtgatagtgagtgcttcggttgccaataaggggcgtaatgtcgtttgcaaccattctaattggtgcgctgttatgccattgccattgacttgcaaggaaccttctgtaggttgaacagcagcgagcactttggtatcaccgcgttgccatagaacagaagcgggttgttgctttagaaaacgccaagtgacttgcactggccgtaaatcattatcagcacgattattcattcggaccatcgtttttttcctccttaatgataacttgttgggcttcaagggttgggattgctaaccattgacgcgcgattgcttcgaaattggttacagatccggtcgtataggtgtgtagttgcccagctgttgcatcggccaccaactgattgcgatcttgtaatgcctgaatcaaactatcaacagcggcatgcgcggggtcaaccagcgtgactgccggtccaactgtcttttgaatcgccgcggttaataatgggaagtgggtacagccgagaattagcgtatcaattcccgtcccgcttaatggcgcgagggtttcgtcaaccgtgttttgcacagtttcgccactcaattggtttgcttcaatcatcggtacaaaagttggcgcagccaaactcgtgacgtgtgtcgccggtttgagtgcctttagttgataggcatatgcgccactgttaatcgttccggtcgtggcaattaccccgacatgccgattacgggtcgttgccaatgccgcttggctacctggtgcaatcacaccgattacaggaatcgtcaattgcgcttgtaaatcaggtaaggcggccgccgttgcggtattacaggcgacaaccaatgctttaatattttgcccccgtagaaaattggtcatctgccacgcaaatttgcgcacggtttccgccggcttttcaccatatggtaggcgcgcttgatccccgataaagaccatgtcttcgttgggtagacgtttaagcgcctcttttaagagggttaggccccccacacctgaatccataaaaccaatgggttgtttttgcatattagatttctcttttcatttcaggatacactcgtaacttctattttctcttttttcggtgcaaaattcaactaaaacaacgggcacggccggcaattcacagttggcgttaatttttataaaaaataaagagttttcgcggtataataggagtacttataaaaaacgaaccataaaggagtgccactgtgactcaatcacgctatgaacaactcgcccaaaatccacaaactgcatcatatctgacacaggcaacattacgggatatcttgttaccatcaattcttggggccgaaaatgacgccatcagctattgggccggtaagcaactcgctttgcaattcccactcgattctttcgaagacctctgtgccttcttcgaacaaatcaacttcggccatctcagtcttaagaaacagaagaaggaacaatacttcttcgaattaacaggcccgattgtcgcttcacggattgcggatttcgatactcctgacttccaattagaagccggcttcgttgcccaaatcctcgaacaacaattgcggattgtgactgaagccaaagcaaccattgaaaataaaaaaaacgtaacgattttcgtccaaacagattcaaaagcaccaattgaagacgaagcagtcgaagccattcatttaacggttgatgcatcacaagtcgcatctgtaccaagtgaatcagaatctgttgaagaagaaccagcacctgtgatgacacaacctgttgaagcagcccctgaagaagtggctgctcccacactagaaccagaatccgttccagaaacaccagttgttcctgaaccggtggaaccagaaaacaagccaacttctgaagaaacaccacactacacaagaacccgcgtggcagacttaccaagtcgacgagaaatgcatagaaaacacagataagcatgtgctataaaaaaagggtaggaacaaaattaaattttgttcctaccctttttgaatacttagcatattaaacgtgttaatcctcaagtgataaccggctctgtctcactctaatcaaagtcatggacgttattgccgctgacgttttgccagtcgcgacttaagaagtcgtttgacatgtcatagtgcactgcttttgcttttttcgttctcatgaatggttggagtttttgatcaactttcaaccagccacgccagccaagatgaatcgtatcttgcatgaagaattgttcattaccgtcgttagtcatatcaacaatgttgttgaagccttgcgttctcaattgatattgaatcttcttatcaaaacgattcaacatcgcttgtgagagccctgtataagcggcccaacgcgcattaacgggtggaatgatgaattgaacagatactttatgggctgcgaagtaatctaacatcaattggaaatcagcaaactcaggtgaactttcatagttaaagtgactttgttcacccttcaatttaccaacattgggtttaacccgttttttgtaaaaactattttgaatgccaaacggattatcacccgttactttttgtcctaattccgttgcgacttgatcaagttgcatgttatcaggttgttttggtaacaccttcaagcctttacgcaattcgcgttcacgaccccgaatgaataattggctgaagagttgatcttgatgttgtaacgctgggcgtttcacattattaatgtatactttttgcgtctccgttaaaggtatgcctaaagctttgttcttcaatgcatcccgcattaccccgttggttgtatcacttgtgagttctagaattcgtttcgctgcataccgcgtactttcagaatccttcgcgtggattaagaaataactggtttgtagtggtgaatagaagaaatcgaacatctcaggttttaccccttgtggtacaaaccattgtggcgaaataacgacgacggcctttttaccgttcaagtgattaccagtcgcttgaagtgataaaaagtgggtcaatgactgagtccctggtgcccctagtaggaatggcttattttgccaatcatacttgtttgccataacagatggatgtaacgcgtccattcgggatagttcggatgaaccaatcatcggaatgtagttgtcgttaaatgcagcatctttgatggcttccccttttagcacattggcggataatgacgtcgccgctgtcgacaacgtcttttcgctaggtcgtcctaatcgaagaggtgatagtaataaggctgttaagcagagaccggccactaaaaccgggccgaaaatttgccataaacgtttaaacattttattgcaattcctttacgcgagcaatgatcttgttaggtgttgaccatgcttcacgatcgaattctgaaacaggtacttcaatatctaattggccttgtaattcaagtaacatttgcacagttgccattgaatctaatgtccctgattcgaataattccatatccatatcgtctttaatatcgtcgttccctgttaaatctgctaaaatttctactactgtattttctacgtccatgattaaatcgctcctttagtgtgtaggtcttagtggaaccataaccggtccaaaaagcctgagaaaattagaaaactgagacaaacggtgttaaacgttgcaaaaattgctaagtagttcgtccaccgattgctgataatgtgatccttgtgtttcttcttgaaacgcaaccagacatcggtaaggatgatccagatggcgtggaacaagccgtaaacaatgtagtaccatgtcaacccatgccagaagcccatcaataagaagagtgttaaatagccgagattggcaatgaggaccttgttcttggtaatcttatgtttcatcaagaagaacactaagcgcatgtagatgtaatctctaaaccagaatgataatgtcatatgccatctattccagaattccttgatattggttgatgcaaatggcttgttaaagttaattggcgtttcaacacccatcacataacttgtcgcaacagcgaataaactgtagcccgcaaaatcgaagaataaatacatactgtaaacatacatgtaaccaacaagcccccatgagatatcaaggaacccaccgcgactcgccattgctaaatgcgcaactttagggagtaacacggtcccgaataagtaaccgagcataaacttatacacaaagcccaacatgaagttgtggactgccttgcccagtaagtcgagataatggtcacgatcaggaacttttaggtaatcttttttgaaacgacgataacggtcaattggtcctgatgaaatcgtcgggaaaaatagcataaattgtaagaataaccatggttcaaatttcttaatactgccatcacgggtttccataatcatcccaactgacttaaatgtcagataactgatccccaagaagccaagaattgaattactacccggatttaagaatggcacgaacttgacaatcactagcggcataatcgctaagataacagccagatcgaatagccaggtgttgttgtgcttttgacgatagacagtgtatccccaaatcagtgctccttcgaacaggacgtaaccaatcaaggcaattccctggtgaaccttatccccgtcaaagattaggatcaaaaagagcagtgagacaagtgtctcataaacatgccaacgtttgccgttaagtaagccaatcactaacggaattaacgccgcacctagaatgagaaagtagttcggattcgcgtacggttgtaaattaggcattgccattaacctctttaatcaacgctttacgatcaatcttcccattgacggataatggtaatttttcttgataaacaaatcgttgcggaatcatgtagtccatcgtattttcagcgagttctgcttttaacgtcttcgttaaatcattgcccgcttcttgaccgtctgctggcacaacataggcaatcaattgggtgacttgatgggctttgttgtagcgcggtacggtacatgcttgatgaacggctgctaattggcttaagtggtggtcgatttcctctagttcaatccggtaaccgtgcatcttaacttggaagtcggtccgccctttataaaagagcaagccatcttcgttttgggtgaccaaatcgcctgaatggtagaagcgttgcccgtctttttcgaagaaggctgcagctgttttttcaggattattcaagtacccttttgaaacacttgggccactgattaagagttcaccaggttgaccaactgcgactggattattttgttcgtccactacgacagtttgagtatcagcctttgtgtagccgattgggagtcggtcgtaagtcgctaagacctccgccgtaatttcgatgctcgtcatcgcaacggtcgcttcggttggaccgtaagtgttgaagatttgtgcatcaccgaaacgttcgattaacttcgttgctgtttgatgcgttaattcttccccacagaagacgaattgttttaattctgggaaatgttcactatcaaatgttggtgataataagcagatttctgcaaaagatggtgttgaaacccattcgttcaccttaagagttggcaagacttcaaataacgtcttgaagttgtccgtcacagctttttctaaaacgacgagggttgcacctgagcataacccgggaaataaatccatgactgataaatcgaatgagtatggggcctgaattagaacgcggctgttatccgcaacgttgaaagctgggttggcccagtcaacgaaactttgtaaattgctttcgctgatttggacgcctttaggtaaccctgttgtccctgacgtgaagatgatgtagaaattctcattcccttgcacactttggctagcatcataatcggttgctccgtttgcaatcacatctgtcaattgaggttctgcgaaaacgggcatattaacatcaatagctgtttcaccagcccatgataggacagtagccggcgttgcgactgattcaatctgtttaatccgcgctggatctgaatgttgttccaccggaatataagcatggcctgctttaacagcacctagaaaagttgctaccatctcgaagttttgaccaccgaagataatcaccggtgctttagctggcaagtcttggctttgaatgaaatgagcaatccggtctgaagcagcctttaagtcggcgtaagtgtgttgcgtcgtgcctaattgataagccacagtttgtggttggtcaattgcaatcgcatcaatttgttgaatgatattctttttcattttaacgacgctccttcattagaattcattgtagataaatttaggactaccgataccactgtaatcatataaataaagtagaattagcagaataacaaaataaattatggttttgccaatgaaattgacggccggtttattccaaaaattaagtattttttgacccattttttcaccatctctttctctctctttttgattttcatcattttgttcatcattaaagttaccacaacgtttattaaacaaccactaacatttttgtcacacgctgtcacataaaaaaagcacctactaaatagtaggtgttttcataattagtcggtatattgtgccaaaatcgtttctagttgttccttattatggaagccagtaattttttcaacaacttgaccatcttttttaaccactaacgttggaatcgccataattccgaaattagcaggcgtttctggattagcatccacatccattttactgaacttaactttgtcgttagtttctgccaatgattcgataacaggtgattgcatccgacaaggaccacaccaagttgcccagaagtctgtcaagacaacgccactctttgtttcttcttcgtaatttttatctgttaatacttcaaccattattcttcgccctccattcaattgtacaaaatatattatttatcatgatactcctatatggcgtaaataacaacttaactcgcttattattcgttacaaacggattattttatccccgtttaatttaacaagcctaaaaaaacacccccaatcaaaaccagaaaggactggttggattgggggcgtaaacgtgctccagcaggcaaactcctccggttagctacaccagccaaacgaccaacaagttggtcattcgtctgcctatgctaatcctcggcgtataaccgcctgcttccgcactctatttgaatgttacgattgttgcgccattgccgcctgcgtttgctggggcgtattcgtatttcttgacttggcgattgccttttaggtagtcctggacaccttggcggattgcaccggtccctttcccatggacgattgtcacttgttggtagttcgctaacaaggccgcatcgacatattgatcaacttcagccattgcttcttcgtagcgtttgccccgcaaatcaagttgggctttaacataccgcgctccaccgctgttgacagttgtcatatgccgttgaggtcggttatcttcaacaactttttgtttctcaaggtcttcgttagcaatcttcatcttgataatgcccatttgaacttcccagttcttggcatcgatttgccggactaatgtcccacgttgaccgtatgaagtaactaaaacatcatcgccttctttaagggtttgacgtcgttttgcccgttgcaatactttgtttttcttcaaggttgtttcttggtgcaattgccctaattccgacttcgcatcgattaattgattttccttaatctgggcgccttgattcatctgcatatcccgcaacttggtaatcactttgtctgctttaacttcagctttttcgacgatcgcattcgctttttctttcgccttcgtcatttctgtttcacggtcttcgaagaattgttgataagcagttgataactgttgatgcaagtcagtcgcttctgctaattcatgccgcaaagcttggtattccgtttcggctgccttacgttgattttcgagatcggtaatcatattatttaaatcttggctttcatcgttcatcaattgtttagcttgttgaacgattgagcttggtaaccctaagcgcgttgaaatatcgaacgcgttactacgaccaggcaccccaattaataaacggtacgttggttgtaaggtagccacatcgaattccatgctagcattaatcgtttgtggccgattgtaaccgtaaattttcaattctggataatgggttgaggcaacgacatcagcgccaacaatcccaatttgatccaagatagcgatggctaaagcggccccttcttgtggatcagtccctgcccccaattcatcgagcaagaccaaactacgatcgtcgatatgttggagaatctgaatgatgttttccatatgtgctgagaacgtactcaagttctgttcaattgattgttcatcaccaatatcagcaaaaatatccgagaagacgccgacttggctctcttcacacgcagtgataaataaaccagattgggccatcacttggactaagcccaatgttttcaacgtgatggttttcccaccggtattgggacccgtaacaacgatggcctgataatccgccccaatcgcgatgtcattagcaacgactttagctgggtcgattaatgggtgccgtgcttgtttgagttcaacatggttttctaaattaatcagcggttcagtggccttcaacgctttagcaagttgagccttagcattgacaaaatcgagctgccccaataattcagcgttggctaaaatattgtggcgttctggcatgatggcttccgataattccgccaaaatccgttcaatttcttgttgttcttcaatttgtaattggcgcaagcggttattcaattccatgatggcttgtggttccatgaaaagggtctgaccactagcactctgatcatgcacaacgccgccgaattggccacggtattcttgtttaacaggaatgacatagcggtcatttcgaatcgtgacaatcggatcactcagatatttagctttagcaccgtgtgtataacttgccatccgcgatctgatttggccttccaattgttttaaaccagtccgtaagccacgcaacttggttgaagccgtgtctaaaacggcgccatcatcagcaacagaacttctaatcttttcagttaattgcggtaaagtcaccaattgggcaactaagtctggcaacgcctttaaggttaattcatctttttctaagtcatcaaagaaacgcacaaccacagaagtcgcacgtaaaacccgcccaacttgcgcgagttcgataccgtttaaagtcgcaccgatttcgattcgtttcaggtgcggacgaatattatctaactgtggcaaaggaatgccaccttttagccgttcaatatcgaccccatctttggtctggtccaagcgttcttgaatcaattccgcatcgttagcgggggttaattgtgtgatttgttcttgaccaaacgccgtgatggcatggccttgaagcatttgtttaattttatcgtattctagtgtttgtaatattttatgattcatttaagttagctccttctaaaaaaggggcgacttccgtcagccccaactgcactatccattttagccagcaatccaccagctcgtcacttgagaggtgaggactggtgtgtgtaagacaatgacgcgcgcaactgtcgagttttccaatgtcttctgtaagccatcgactggcactaaagccagcacgtagaggagcaaaaagagccccacgtaaacgaccaagaaactcaaaagtccaccggctgccttgttaaattgcttcaaacctggcatataagtcaatgaattcaacaatagtccgatgaagcgcaccaacaagccaccgataaacatcacgaggacaaaggcgacgccgatataaaacgcatcatcgagtgacaacccgatactcttttggaaaaatgcaaaatagctgtcttcagttgccgatgggtatggcaccattaaacttagcttaggccctagtgtttggctcatcgctttggcaatccaaaagacgataaagtagccaatcgtgtagacggcttgcatgataaacccccgtctgacccctgtgtaaatggcatataacagcattaagataataattagacttaacatgagttccccttagatacgcgttttgtggcgtggatgtgtgtatgattgattggataaagtattctgaaacgtgctccataagccatcttcttccggttagctacgcctcgcaaacaatcgacttcgtcgcttattcacgagtctatgctaatcctcagaagatacccagcttattgcgcactctgatttttgaaacgtgctcttgcaggcatatttctgcgcttaaccaaatttgccaaatcggcgattgcatcgccaattcgtcaaatccagttaatactcaaaatataaccgcctgctgtcgcactctttttttaacgtactcctgcagatatactcttccggttagtttcataccgcaaacgatcggccttgccggtcattcacggtatgctactaatcctcagagtatgaccatctgcagtcgcactctaattttatttgctagttcaactgaactattttatcatgaaataagggaaagtggcaattttactccgaatctcttcatttgccactcattaaggagccaatcgtatgcaagcagtcattaaagtgacaccctcacaattaactactattcaaaaaaattatccgaccaaccgtcaactaccgccgggggccgtttttgcgcaccaagccaatggactaagcattaccggctataaatctggcaaagtacttttccaaggcgctagtgccgaacgagaagctgctaagtggggcaccgctacccctagcaaagcaaaatctgctagccgtactaagcctaaagccgccaaaggcgatgttttaccagctgattttgccaaatggtccgttttaggctcagatgaagttggtaacggaagctacttcggtccgctgaccatcgccgccgtctatgtcagccaagaaaatctggcgttcgtcaatagcctaggcgtcgcggattccaaaacgctaaccgatgcacaaatcgatcagatggcaatcaagatgatggctaaactcccctatcacatcgtcaacatcatgccaccgaaatacaatgaagtacacgccacaatgaacatcgaaaaaatgaaggccatcagccataatttcgcactcctcaaagtcctccaaaaaatccaacccgaaaaacccgctggcatcctcattgatcaattcgaaccacgcggcatttactacaactatttgaagaatgaaccggttgttttacgcgagaacgtttatttctcaaccaaggcggaacaatttcacctcgccgttgctgccgcttcaatcattgcgcgccaccaagccaacctatcaatgcttgaactgtctaaaaaagcgggccgccaaattccgctcggcaatcatcaagcagttaaccaaatcgccgcagatttactcgcacaaggtggcatcgattacctaggcgaattcgctaaattgcattttattaacacggaaaaagcgaagaaattgttatagagtgcgactacaggcggtgatattttgagcattaactggatttgacgaattggcgatgtaatcgctgatttggcaaatttagttaagcgcagaaatatgcctgtaagagcacgtttaaagtgcgtttaaagcgggttgactctgagcattagcacagtgttgtgaatgaccgacaaagtcggtcgtttgcgatacgaagctaagcacaagagtcagctttaaaaagcacatttcaacccacaccttctccacataaaaaaagggtcccgactgcaatttaattaattgctatcgggaccctttttgaaatagatggtgataacgtgctttcatcaacaacttcctgtgctttgctacacttatcaaatcggcgattgcatcgccaattcgctaagttaggcaaatgctcagaagttccccgttgatgacgctcttcttttctttaacgtacttttcaaaccatacttctgcggctagctacgtcccgcaaacgatcgacttcgtcgctcattcacgggactatgctagtcctcaaagtataaccggtttgaacgcacttatttcatgttgtcgtctgccaaaaatgtgtttagtacttcttcaaccatttcccattcttcgtcgtcttcgattgggaataggtcacctttgctggcatcgcctgcatcgtctgatgtgaatgagaaagcttggatatcaacttcttcatcttcttcagcgcttgttgggtacaatagcacgtatgatttaccgtaatcttctgaatcaaatgtaaagagcacttggtataattcctcgttaccttggtcgtcgattagtgtaatttgttgttcttcatcttggtggatgttcttgttatcttcagtcattcatcaaaactccttaattgttttatttattagccttgtgttaagcgaccgtgcgcgtccaagtagttctgcaaaatcatcaccgcagcaagcttatcaatcacttgcttccgtttcttacgtgacgtatctgcttgttccactaacatgcgttcagcctgaaccgttgttaggcgttcatcgatgtaatcaaccggaatctctgggaaaagttcactcagcattgccccgtattcttgcgctttaagcgcccgtggcccaatcgaattattcatattcttgggtaaccccaaaacaaaaccagtcacttgatgttctgcaaccaattccttgacgcggtctaacccaaattctgattcatcttcattgatgcgaataatctcgaccccttgagctgtccagcccaatagatcactaatcgcaatgccaaccgttcttgatcctacatcaaatcccattaagcgcattatttcgtcgtttccttatccaaataatttttaactaattcctcgataatctcatcacgttcgtgcttgcgaattaaattacgagcatcattatagcgcggaatgtatgctggatcaccggacaacagataacctacaatctgattaattgggttgtagcccttctcttctaatgtctgatagaccgtcgttaatgtttcatgaacattcttggggctatttttaccaaaatcaaaatggactgttttatctagattcatctctcaacacctcaacttttcgctacttatacaaccatattctactcgaaaacaggacaaagtacaactctcccctctcttagcagaatgcggatgagagataactataacacatttcgctaaattgattaacaaaaagaacaaaaaaataacgggattgcaatcaataaaaaattgacgacaatcccgttataagttaagcgttcgctaaagctgttttagcagctgccaaagcatctgcgatcccagctggattcttcccaccagcttgggccatgtctggacggccaccaccgccaccaccaacgagtggtgcgatttgtttaatcaaatcaccggctttaatccccgctttaatcgcatcaggtgcgaccgcgacaatcaagctaaccttatctcccgcaactgttgcgagcactaagacatctgaaatttgtttttgttgccattgatccgctaattgtcgtaattcgttcattccggcaacttttgcatcagcagccactaagcgccattgaccaactgtttcgacattttcaaaaacattgccagcttgttgttgggcaaattttgctttgagttgttcgttttctttttgttctgcttttaagtcagattgtaattgttgaatcttcttaggtaaatccttagtttgagcaactttcaattcaccagctaattcatttaataaggcttgtttgtcattcaaatacttgaaggctgcctttgaagtcacggcttcaatccggcgcgtcccggcaccaatcccagattcgctcgtaatcttgaatagaccaagatcagcagtgttagcagcatgcgtcccaccacaaagttccattgagtaatcaccgatttgaaccactcggactgtcttaccatatttttcggtaaagagtgcgatggcccccatttgtttagctgtttcaatatcggtttcaacagtattcacaggtagtgcagcccaaattttttcgttcacaattttttccacagtggctaattgatctggtgtgacttgaccgaggttcgtaaaatcaaaccgtaagtagtcaggttcaaccaatgaaccagcttgatgcgtatgttcgcctaaaacatcacgcaaggcttgatccaataaatgcgttgcggtgtgattcttaatgacgccaccgcggaaggttggatcaactgataagacatagtggacaccactaatcatttcttcgagcacttcaacggtgtgtaatggttgcccgtttggtgcgtattgcacgtcagtcactttagcgactacttgcccagctaggttcttaatgatcccttgatcagcaacttggccccccatttcagcatagaatggtgtttggtcgaagattaattgcgccgtaccactcttaatcgtttgttgttcggcattatcttgtaagatgacgcttaacttactttctgtttcaagcgttgtataaccagtgaaggtactttccactttgatatccattaaaagttcgttttgcatccccattgattgttcatcactacgggcattacgtgcacgtgatttttgttgtgccatttcactttcgaaaccagcttgatcaaccgttaagccttcatcttcggcatattcagttgtcaattcgattgggaaaccatacgtatcaaataacttgaaagcatctgccccagcaatttcactttgaccagcagctttgacactgtcaatcgtttggttcaataaacgtaaaccatcattcaaggtttcacggaaacgatcttcttcagaacggatgactttttcgatgaattctttttgtgctaatacgtctgggtaatagctttgcatgatttcaccaacgattggtactaacttgtacatgaaagcgtcgttgatgccgagtttcttaccatttaagatggcccgacgaattaaacggcggagtacatagccgcgaccttcattggccggcattgcaccgtcaccaattgcaaacgtcacagcccgcgcatgatctgcgataatcttgaatgaaatatcatcagctgcattttgaccgtattgtttgtggtcactcatcttagctgtcgcttcgatcaatggcatgaataaatctgtttcaaagttggttggggcttcttgaatcactgaaacaagtcgttcgaggcccatccccgtatcaatgttcttgtggggttgttcaacatattcgccgtttggtaaatggttgaattctgagaacacgatgttccaaacttccagataacgttcgttttcgccaccaggatagttttcaggatcatcttcgctaacgttgttgaagctttgaccacgatcgtagaaaatttctgaatcggggccacaggggccttcaccgatatcccagaaattatcttcaacttcaatgatgtgtgattctggcaaaccgactttttcatgccaaatccggtgcgcatcttgatctttaggataaaccgtcacgtataatttttcaggatcgaaaccaatccacttgtcgctggttaagaattcccaagcccatggaatcgcatcttctttgaaatagtccccgacagaaaagttgccgagcatttcgaagaaagtatggtgacgagcagtcttcccaacattttcaatatcgttggtccgaatactcttttgtgcattggtaatccgtggattattaggtacaacgcgaccatcgaaatacttctttagggtcgcaacccctgagttaatccataataatgtcggatcatcatctgggacaagcgatgcacttggttcgacatcatgacccttttctttaaagaaatctaagaacatttggcgcacttgcgcactggttagttttttcatcatgtttgctccttcaaaaaaataaaacaccgctgcaatttcaaggacgcaaaagcgcggtaccaccttgattgcaacgatgttagtcgttaacctctttatgagtttattgaattgtttgtgatgttggggagcacgtcaaccaatggcggcaccttctctcagtctagaaaggcgttcctgtctccgtcagttcgttgcgtatatcccaacacttccaaagtataaaaaagatttgctgaattgtcaactaatccaaggtaacggtaatcgcaggccgatagtagcactgaagcgtcggattgcccaatgccgccgtttgaatcccagattcataggcgggtgcttcaggcaaccattgttccaaactataccgtccccctgtcacacaagcaccacccttataaacaagtggatcttgagtaagttcataaccgtcagcggctgttgcttgtaacccaaatggcatctgctggcgctgagtcggtcgtggtaagtgattaccacttaaccacaacgtcttactccctgcacctttaagccattcatactgatcaacactcaccagatcaaaaccgcgccgccgcaatgtctggcgtagttcactttcgtcaccattagttttttcaaacacttggtaacaatctggtcgcccacccgcttgtaaaattaggtgcgcactttcaagtgtttcagctgaattttgttcccgccgcgcccgaaacaaggtattttggatttccgccaaaaactgacgcccaactagttggtttccattaaaacgtcctgttgtcgtttcatactcgccttggagtacccactcacttgaaattggtgtttgtgccactaacatcggtgccatattaacaatccgatattctgatgtcatctgatcaacgtattgatcgacatccgcttgcgtcgcccaaacgagtccttgatcaactggtaacgtacgtttagtttgtgcaaaccactcactcggtgctaagtgggctacccctgcttgccatcccaactgcacattagcttggccggggataaaaataaactgctgcccagctagccgggcactgtaagtttgaaatacttgagtgccaatcgttgcggtctcactctgaatcgcttcaattggaatcagcgggctaacaaagtagcgcaacacctggccaaaattagcgcgccgtgcttcttcggataacgataaccagttcagtaattgtaagtcattttcatgcatcacagccacctcgattatgaattaactagctattttgcttcttgttttgacgtttcttttcacgtaattcaagtcgttgttcaatccggcgtttcttttgtgcatcttgtttaatggctgctttaatctttttcttataaccgggtttgcgtttaagtttggcctttttgaccatccctttcatgccgacatctaattcatgcgtggtagctacccgttttttacgacggttccgatcatatgatgtgaccaattcgccatctttaaatgtctttggtgtgaacttgatgcccattgcttcaatttgtgcaacggcttgttcatcatctggaccataaagcgtaatcgcggttcctttaagaccattccgaccagtccgaccaacccggtgaatgaagaattctaaatcttcacgtgggacttcagcattaatgaccatgctaatcccttcgatatcaataccgcgggccgctaaatcagttgccacaacatattgatagtctaagttatgaatttctttcataatccgtttacgttggcgtggtggaatatcgccatgaattttagcgactttcaagccttgtgattgtaaataacggtggatgtcatcaaccttgctcttcgtattagcgaaaaccaagaccatgaaaggatggcccatcgtcaataatgaataaatggtttggttgagggctttccccttcgttggcactaaccagttgtcgattgttgggctaatcacagtttcgtttttaacttcttcaatcacaggattgtgcatgtatttttgtaagaagggttgtaacttatcaggaatggttgctgagaagaccatcatttgtaagtcttctggcaaacgactagcgatgtcatcaactggcttcaaaaagcccatgtcaagtgtcatatccgcttcatcgatgaccaagatcttcgctgtataaatcttaagcgccttgctcttgattaaatctaaaattcgaccaggagtcccaatcacaatctgtggttgatgttgttcgagtttttcgatttggcgttgcttgtcagtcccaccaacataacgaccaatccgaatatcccccgtcatgtgttgagtgattaattcggcagccgtatagatttggtaagccaattcgcgacttggggctgtgatgacgatttgaacttcgtctttttcaggcaccagtttatttaaaaggggtaataagaacgcgtgggttttcccactccccgtttgtgattgaccgataacacttttaccagcgttgatggctggaatcacacgccgttgaaccgccgtgggttttgtaaagtgcatgtcgtctaaagccgcaatgatttcgggttttagattaaattgtgtaaattgattatccataaagtcctgctttctattgtttgaatccggtaaatctggatctgcgtctattcagtgtactgcgcggctagctctgataattctgcaataattatgtcgatttcagcttgatcagctgccttagcgccactagcgagtggatgaccaccgccatcatgttgcttcgctagttcattaatgattgggccctttgagcggaaatgcacgcggtaagtgtcatctgcttgttgcacgaagatgacccacgttaatacccctttcaaacgaccgggtgttccaacaatcgagtgtacttgttgcggttcaacatgtaaccggtcctgggttgcgcgatcaaccactaagtaggcgacttgttggtcgttcacttgaagttgatcgaataagtacccttgtaatttggcttgttccaacgtgatttcgttcatcttttgattgagcttatcatggtgaatatcaaacgtcatcatttgggcggcacattccatggtatgtggactggttgaattaaacatgaagcgccccgtatcaccaacaatcccggcatataaaacacgcgcagctgcttgattgaattgtaagtggccttcgctgttattgacgatgtcaataatgatttctgaggtacttgaggcatcaggtaacacccagtttaaatccccataaggatcatcgttgggatgatgatcaattttgattaattcagcgcctaagttaaacgtctcaccactaatccgaggtgagttggctgtatcagtcacaatcactaatgcaccttgataagcagccggttcaatttcttgaacgtttgcgagccatgccaagttaccggtgtcgctcccgacttggtaaatcgtcttgtctgggtagctgttacgcagtacttcagctaagccaacttgtgagccaatcgcatcaggatcaggattgacatgacgatggatgataatcgtatcgtaagtttcaattttagcaataatttgttctggagttgtcatttattaacctctttctaagagttgaccagtgacgagggccttagccacaatcacatgattggcgtaaacatcgacatcgattttagctgaacgccgtccaatttcgagcaagcgtggtaaaatctgaatctgcgtgtcgatttgaatcaaccgtaaataatggaggttgatctgttcaatcattgaatagcgctgatgttgcgtctggagcatttgttgacaagctgccgaaaccgcttcggtcagtacaccaaacgaaattgtccctaagttattcgtcatctggggcgtcacttcatattcatatgccgccgtataaaagtctgggacagtttcactaggacgcagtggttcgacaatctgatcataaaacgtctcggcgacttgcggttggcgttgcgccgtttgcatgttgctcatgacatcttgccgggtaattaacccttctagttctaaattgtccgccaccactggcatcacttctaaactattccaagtcattgaatggccgacactggcaacactcatgtattttttaacgctcgcgggttccttggtcatgactttatccaaggtcatcgtggccggtttatctaaaatatccttcaccgtcacaatcccaacgaggcgcatatgttcgttgacgactggaaaacgcgattgttttaccgccgcactcaattgcttgtagtcggctaccgtttgattagcatgtaacgtgtggatttcagcaagtgggtggtagatatcagccaccgttatgatttcttttttaatcaattgatcggtcaacgcccgattaatcaatgccgccaccgaataggtatcgtaggcagtttgcaaaatcggtaaagccaagtcgttggccaatgcaatgacgtccgccgaagtgccaaaaccgccggtaatcaaaacagcggccccgttttcaagtgctaagcgttgcacatccgtccgatcaccaacaatcatcaatgactttggcgtaatgtagcgcgtgatggcatcgatttgcatcgcgccaatcacaaatttgtccaacaacttgtctaaaccagcgcggccaccaaggacctcgccgtcaatcacttgaacgatttcttcaaaggtcagattttcaatcttcccctttaacttctgttcaatgcggatggtaccgacccgttcaattgtgctgaccaggccgttattttctgccgctttaattgcgcgataagccgttccttcacttaccgagagtgttttggcaattgagcgcaccgaaatcttgtcaccaattggtaaattttcgatgtacattaaaatttgatcatgcttagttgccactcaacgccaccaccctttatcagatttacatagttattaatagtatatcggttttagcgcacaaaaacaaaggaaactcaactattcacgctcccaatcgtataacggtaacgtgatgttttcaaatgtttgcggtgccaagttagtcaccgtaatcccgagcaagcgcacgccatcttctgcatggccgatggtttgccaaatttcccaagcgatcgcctcgagttcagctgccttgccgacatattcgttaaatgttttacgcttagtaatagtttcaaattggcgattccgcacttttaaaacaactgtcaaaccgtgtttttgattcttgcgtaaacgccgttcaagttcaatcgctaacttcttcaactcaacttgcacctgctcttcactgattaggggttgcccgtaagtattctcattgccaattgatttgcgttcacgttggtaggcgaccgggcgattatcgatgccgcgcacgtgccgatataagccgtagccaagcttgccgaaattttgcatcagcatcatttctgattgttcaagcaagtccgcccccgttaaaatcccgagttcttgcattcgcggcgccgttttcttaccgaccccacggaatttttcaattggcaagcgacttaaaaaggcaatcgcttgttccggcaaaacgagtgtccgccccgctggcttgcggtaatccgatgccatctttgctaaaaatttattgtacgaaatccccgccgagctgacgagttgggtttctttaaggatttctttttgaatgtaggcgaccacatcaattgtgtgtgccaagccgagtttattttccgtgacatcaaggtacgcttcatcaaaagcaatcggttcaatcttatcggttaccgtatgaaaaatcgtgtgaatctgttccgagaccgattgataaagcggaaaattgggcgccttaaaaacggcttggtgattcggaatcagttcagctgctttttgcgcactcatcgccgagtgcacaccgtattgtcgggcaacatagttcgcggtcgtcacgacccctttgccaccagtatcactcggattacgggcaatcacgaggggcttttggcgtaagtcgggctgttcacgctcttcaatcgatgcgtaaaacgcgtccatatcaatgtgaatgattttgcgactcgtatcattttctaatggaatcttgaacagctctgccatgttacccctccttaattttttcaacatgctttttcaggcacattgttccgcttttgacgcacttctttctttaacgtgcttttaattcgtaaccttctgtgctttgctacatcagccaaataatcgcccttggcgcttatccgtctgattaggcaaatgctcaaaggctaaccgcgaattaacgcacttcttcctttaacgtgcttttatcaacaacttcttccgctttacctcacttgccaaatcggcgattccgtcgccaattcgtcaagtgctgtaaatgctcagaagttacccgttgatgacgtacttctttcaataagaaaagcctggcatgagcatctcatacacagactttgctgacttgtttaatttaattattttgagtgggatcaaaaatccattcggcccctgttgttgccagtaaatctgttgcttctttaggccccattgaaccgattgagtaacctggtagtggcgtttgatccgcatcccagacttcacgaatcgcatcgacaaattgccatgaagcggctaattcatgccaatgtgtgaagttcgtgccatccccattgagcgcttctaaaatcaaacgttcataagcttctggactgtcagccaacatctgttcatcatattggtaagccaattgatcaggtttcaaggcgaatccttgaccgacttctttaccattaatcgttaatgaaaagccttgttccggttcgacatagattgttaagacatcaggtgccattgctgaacgatctgacttatcatcagcaaaaatattgacgccagtcttcttgaagacgatattgatttgcgtttctttacgtgccaatcgtttaccggtccggacgtaaaatggtacgccacaccaccgttcgttatcaatcatcactttcccagcgacaaatgtttcggtttgtgaatcaggcgcaacgttggtttcttgttgataccccggtttgttttcgccatccaccgatgtttcagcatattgggcgcgcacaaagttttgtttgatttctgctggtgagtaaggttgaatacttctgaaaagacgtgttttttcacgttgcacatcttctgccgtaaagttaaccggcacttccattgcaagcattccgatcacttgcatgatatggttttggaacatatcgcgcaaggcccccgatgtttcgtaatagccagcgcgttcttcaacccctactgattcagccaacgtaatttggacgttatcaatgaattgattattccatacaccactcaatagaccgttcccaaaacgcaaagcaacgatattttgaatcatctctttaccaaggtagtgatcaatccggtagatttggtcttcatcaaaggtttgcgtcaattcttggttaagcgccttagcactttcataatcgcgaccaaatggtttttcgataatcaaccggttaaagccatccgccgttaggagcgcttctgatccgagatgacttgcgattgtcccgaagaaccgtggtgacatggccatgtaataaatccgattttggtgtaattcgtattgttcatccaactgacttgctaaagcctttaatgtttcgtagtgcttggcgtccgtcacatcatgtgattgataatagaaatgacctacgaaagcttctttagttgcttgatcttcatcaaagttgtccaaagctgtcatgacgatttcgtgataatgatcatccgtccatggccgccgtgctgttccaatgacagcgaagtgttcttttaaataacccttccggtataaattaaataatgcggggtataatttccgttgggctaagtccccggaaccaccaaaaataataaagagtgctgctaaatctgtgtgcatatctcacaccactttcatataaattaattttgtggcgtcacaaagatgtgttgtgccgctttgaggccgatttggatttctgtttgactcgtattattaaaaacagtcaacggactttcgaagaggccaaccttttggagcgtcacactgtcaccgactgacaagccgatttccagtgtatattttaataagtcattatcatccaatacgcgatcgataatcgccgtttcacccacttgtaatgtttcaagtgcgatgtgactttgttgttcgaattcccccttggcattgggtataatcccaccatgcgggcaacgcgttggatgccccaagaaatcagctaaccgttcagccaagtcgtgattagtaacatgttcgagttgttctgcttctgggtgcaccgtattgaattgataatgtaacttgtcgactaaaaaaacttcccataaccgatgattgcgcactaatagggctgcttcgcgggcgccttcacttgttagttgaattccttggtaaggtgtgtggttgacgtagttttccttcactaacttattgaccatttccgtgactgatgccgccgaaacgttcaatcccgctagtatttccttattggtaactttctttgcgtcgccaccaagttcaaaaataatttttaaatagtcttctttattgggtgtcattgccatccagatccttaatcaagtttgtcgacaaacttttcttagttatccctgaactaaatgaatgtctactttctattatgccttatttgtaataattttcataccattaagcttcaatttagtcccttaaatagtaaaaaattaatctcttttcagcaacaaaaaaaggcggtagaccgatttgtttcagtctaccgccttaaatttgtggtcgggcttctcaaaccacttattctagcaaatcacttggtcaatttgctagaattctgcttcgagaatccctttcaattctttaattaatggttcttttggattggttaccgtacagttatcttcatatgccagttctgctaaatcatcaacgtggcgatcaaagtcggcctttgtcacgccattatcacgtaaacgcatcttgatgccgatactttccgccaatgcagtcacagcatctgcgtaagcggccaccagttcttcagtcgttttacctggtaaaccgagataacgtgcaatttcagcataatcttcatctgctctgaagtaactgtatttagcccagagtgcccgtttcgttggtgtcttagcattatagcgaatgacatgcggcattgtaatggcaatcatcaatccgtgcggcaaattgaacgcgccgcccagtttgtgcgccagtgaatggttgatacctaatagcgcattggcaaacgccattcccgccattgttgacgcatcatgcatattggctttagctgtcttatcgcccgcataactcgcttgtaagttatcaaacactaatttaatggcttgcaaactgagcccttttgtataatttgacgccatcgctgatacgtaactttcagtcgcgtggcataaaacgtccatcccagtatgcgcaaccacgcggggtggcacactttcgatgaattgactatccacaattgccacatctggtgttaacgcataatctgccaatggatatttgatgtgcgtttcactatcagtaatgaccgcaaacggcgttacttcagaacccgttccagaagtggttgggatacagattagtttcgtccgatcgaggtttgggaacttgtaagtccgtttccgaatatctaagaatttttgcttagcgccaaagaagtcggcatcttctgaatcatagaataaccacatccctttggccgcatccatgactgagcccccaccaatagcaacaattgtatcgggtttgaagcgtttcatcacttcggcgcctttataaatggtatcggttgatggatctggctcgacatcggcaaatacttggacctgcacttgatctgtgcggcgcgccaagacgtcttcaacaatttgcacgtaacctaagtcgaccatcccttgatcagcgacgataaaaaccttatgcaagtccgccattttttctaaatagttgactgaatttttttcaaaatagattttgctgggcaacttcacccattgcatgttattccggcgcttggttagcgtcttcacgttcaacaaatcgatcgttgaaacgttgtgggagattgagttatggccgtatgacccacagcctaaggttaatgatggtaacatgtcattgtataaatcaccaatcccaccttgtgctgatggtgtattcactaagacccggcatgctttcatccgttttgcaaattcgagtggtaaagcttcatccgttgtatgcaacgaagccgtatgcccaagaccaccaagatctagcattgcttcacagagttgcaagccatcttcgcgatctttagctttaatcatcgcaagtacgggtgataatttttcatgtgagagtggatattggtgtccaacacctttaatttcagcaattaaaactggcgtatcttctggaatatcgatcccagctagtttggcaattttagcagcagattggcctggaattgaaggtcggaccgcattcttatctgggtcgattactgcgtcattgagtgctgataattcgcttggtttagcgaagtaaaccccttgtgcttggaattccttcttcactgccgtataaatttcagcatcaacaattacggcttgttcagaagcacaaatcatcccgttatcaaatgatttcgagaggattaaatcattgacggcttgtttgatgttcgccgaagcttcgatatacgctggcgcattcccagccccaacccccagtgcgggtttaccagttgaataagcggctttcaccatcccaggaccaccagttgctaaaacagttgcgaccccttcatggttcattaaagcctgggtagctgcaatacttggttcttcgatatataagagtgcatctgctggcataccggctttaaccgctgcagctttaatgacattcaatgcttcagccgaacaacgttgcgcactaggatggaaagcaaagatgattggattccgcgttttaatcgcgatctcagctttaaaaatcgtcgtcgaggttggattcgtgactggtgttacaccagcaatgacaccaacgggttctgcaatcttagtgatgccatgttctggatcttcttcaatcacaccaactgttttattgtctttaatcgcattccaaatttcctcggttgcaaaaatattcttgatggctttatcttcataaatcccacggccagtttcttcaaccgccatcttagcgagtgtcatatgttggtctaacccagcaatcgccatttgatggacaatattatcaatcttggcttgatcgaatgtttccaaaattgctaatgcccgttgtgcacgcgtcactaaatcggtgaccatttcattcactgtgttttcaaccgtttcaactgctgctttcttaaccatatcgattccctccatgccaattaactattgtgatttatttaacaaagttagtttagcgcattttgagttgtttgtaaactgttttgtgattataattacaaattttatttcttagttaaaggcgatttatcttttaaaagcctacatttgataataaatttactatataatgcaaataaaaaagcgctcggttgaagtattcaatcgagcgctctctgaattattttgtatcttcttttgtttcttcaaccgtttcttcttcaaccactgttgcggcttctgaagcagttggtgttactgtccggattgcgctcaagttaaacttgaggtaaacgccgtcacaatctaagacaacgattttagtatctgtattaacagaatcaatcacaccgtgtaaaccaccgattgtgatgactgcgtcgccttttttcatttggttcaccatttcttggtgtttttgttgttgtttcttttgtgggcgcattaccatgaaatacatcattgccatcattaaaattaagataacgaagaaactgggattaaaaccgccggcacctaacacaaagtttgccatttaaaaaacctcttttcaattttgtctattactaactctatcagacttatcaagcaacttccagtgattcactagaaattccgagtgttcttttcattgtaaccatattcttcgaagaacgcttctctgaattccaataaattatcttgttcgatggcatcttgcacttgatgcatcaaattaatcaagaagtataagttatggtaactcgttaaatgaatcccaaacgtttcgtccgctttaatcaagtggcgaatgtaagcgcgggtgtagttcttgcagacataacaatcacacttaggatccagtgggcggaagtcttctgagtacttcgcattcttaaccactaatcggccttgtgaggtcattgttgtcccattacgggcaatccgggttggcaacacgcaatcgaacatatcgacaccgcgaatcacaccatcgattaaggcatcaggcgaaccgacgcccatcaagtaccgtggtttgtcttcaggcaacattggtgttgtgaaatcaagcacgcgattcatttcgccttttgattcaccaactgataagccaccgattgaataaccggggaagtccatcccaactaaatcgcgcgcactttggcggcgtaagtcttcaaagccggccccttggacaatcccaaatagaccttgtgttgctgggttttgatgcgcaatcaagccccgttcagcccaacgtgatgtccgttcaactgattttttaacgtagtcataactttcaaagaatggtggacattcatcgaaactcatcatgatatcggcacccaaagcattttcgacttggattgctttttcaggagataagaacagtttttcgccgctcaaatgactcttgaaggcaacaccgtcttcactgatatcccgtaatttcgcaagtgagaacacttggaaaccaccagaatcggttaacacaccgcgatcccagttcatgaacttatgaagaccaccggctttttcaacgatgtcttccccaggtcgtaaccagagatgataggtgttcgataaaataatgccggcacccatttcttttaattcttcaggcgccattgtcttaacactggcttgggtcccaactggcataaacatgggtgttttaaacgtgccatgtggtgtcacaatttcaccaaggcgcgccctggtatgtttttctttcttgattaaacgatacttgatcgctggttccatttaatcgactccaattctaggattattgttggttcagtaataattggtacgcatagcgtttcggtgacggaccgtttgcaatgaagatgtcaccacgatattgaaagcctactttttgaatcatatgttgcatcgccaagttatcagggtgcgtatcgatgcgtaaatcatgtgcgcctcgtaaactggcagcggtcaccaataaggttaaaaactgtgtcccgagatgttggccgtggaaggcactatcgagtgcgacacggtgaattgaaaaataaggtgtcgaaccagattgccattgaccattggtaattgctgcatagccaggatcttcagttgctagaattgaggcgaccccaatcacctgttggtcagccatcagaatgtaacataattcttggcgaatctcgtcttcaaactgagtttgattaggttcacctgcttgccattgatttatttggcgatcctttaaggcggcctttgcatgttcgataatctctaaaatccgcggtaaatctgtaaacgttgcttttctcaaatacatcaatgctgccacctcatttttgtcgaattatttaacaaacatggcatcgccgaagctaaagaaacgataccgttcatcaacagcgtgttgataagcatttaagatgttttcgcgaccggtaaatgaagcgaccaacatcactaaggttgattttggtaaatggaagttcgtgatgaatgcatcaacagctttccattgataaccaggtttgataaagattgatgtccagccactatcagctttgagttcaccatcaaacttcgtcgcaattgtttctagcgtccgaatgctggttgtccccgttgccacgatgcggccaccgttttgtttaacttcattcaacgttgcagcagcttcttctgttaaacggtagaattcgctgtgcattttgtgatcttccacgttgtcttctgaaacaggccggaaagttcccaacccaacatgcaacgttaagtacacgagtttgatgcctttatcttgcaccttttgcaagagttcttctgtccagtggaagccagcagttggtgcggcagctgaacctggttctttagcataaacggtttgatacatttctggatcgtctaatttttctttgatgtatggtggtagaggcatttcgcctaaggcttctagaatttgcatgaagatgccatcatacttaaattcgatcatgcggccaccgtgttcgagttccttggtcacaactgcttttaattgaccatcaccaaaaacgacttcggtgccgactttggcccggcgtgctggcttcatcaaaacttcccattcatcgtcatgcgtgttgtttaaaagcaagacttcttcgtggccacccgtatccggtttgacaccgtataaacgtgctggcaagacccgcgtattgttcatgacaactgcatcgccgggatttaattcatcgataatgtcgtagaaaactttatcttctagtgcgcctgttttgtgatccatcaccaataaacgagacgctgcccgttcaatcatcggtgtttgagcaattaattcttctggtaaattataatcaaaatcttctgttgaaaccattgtgtaacctctttctaattttctgaatagggaatgccgagatgttcataaccagcgggcgtcacaacacgtccccgcggtgtccgttttaagaacccaatctgtaataaatacggttcgtaaacggcttcgattgtttcattttcttcaccaatattagccgcaatcgtctttagaccgactgggccgccatgataatagtcaatcatcatctggagaatcttgcgatcaatactatctaagccacgtacatcgacttgtagttgactaagcgcatggtcggtaatcgcttgatcaattgccgcttggtccgccacttgagcgtaatcgcgaatccgttttaataagcggttcgcaatccgcggcgtcccccgcgaacgacgggcaatctcatgcgcgccttcttggacaatggccatgttaaagacatctgccgagcgttcaatgatatcgaccaaatcatcttcatcatagtatgccatatgttcgacaattccgaaacgatcacgtaacggtgccgacaataaaccggcccgagtcgttgcgccaatcaaagtaaacggtggcaatgggaaatgcaccgggtgcgcagttggcccttgtccgaccacgatatcgatgtaaaaatcttccatcgccgaataaagtagttcttcgaccactctcggcaggcgatgaatttcatcaataaatagcacatcaccaggttgtaactcgttcaacaacgcgactaaatcgccaggccgttcaattgctggcccactcgtcgtccgaatctgaacatgcagttcattggcaatcaccatcgccaaggtcgtcttacctaaaccaggcgggccatataatagcacatggtccaacgactcttcccgctttttagcggcttcaatataaaccgccaactcatttttgacccggtcttgaccgatatattgcgcgaggacttgtggccgtaacgtcttttcaatacttgtttctgcgaaatcttcgttttctgcggaaacaattcgttcttctgccatccattagtcctcctttatttcttcattaataagcgtaaaccttcacgtaagtactgatccgtagtttgtgcattgaaatcagccagtgttttggtaatcgctttgacttcgcgggctgaatacccaagcgcggttaacgccgctaacgcatcgtttaattctggtgattcaccaggcgtaccaagatcgatagccgtttgaccagcgagcgtttcggtttgttccaaatcaccgagcttgccctttaaatctaagacaatttgttgggcagtcttcttgccaaccccagggaacttggtcaaatagctcacatcatcattcataatcgcttggattaacccagaatgatcgctattggctaagatggccaaggcactcttaggaccaattccagaaacactgattaatttttggaaaatttgcttttcatctagatcgtaaaaaccaaataacgtgatatccgtatcacgaaccgcttgatagacataaatctgaacgatatcggtcgttgattcggtgtaacgatacggattagcaacttgcaattgatagccgacgccttgaacttctaagacgacatagtacggactaaccgccgtcaccaaaccttttaaatattcatacataaatttacctactttacgagaacgtatatttgcttgttaaattgtaacataaaatccgaatcgtgaaacagccagcagccaaaaagcgtaaaagaagggcctaagtgacccccggccaactcaaaccctagcaattagtattcacgaatcttcggcggttggtaatccttgataaaggatgccatcacactgaacgaatcggtaaataagtatttttcaaaatcgacctgtgttaaaaaaccttcactgaccatgtgggctaaaaattgttgtaacaaatcataatagcctgcgacattataaaaaatgcagggaccattttgttgcccaattcgcgcccatgaaataacttcactcatttcttccagcgtaccgggaccacccggcaatgcgataaacacatctgccagttcaatcatcttggctttacgcgctgacatcgtatcaaccttaatcatttcggttaaacctggatggacgagttcttgctgactcataaaccctggcatgacgccggtcacttgtccatcatgggctaacaccgtgtcggccacggtgcccattaaaccaacttgggcgccgccataaatcaagcgcgcattgcgcccagcaatccaagtgcctaacgccttagccgcttccgtgtagattattttattaccactactagcgccgcaataaacggcaatgttttgcgttgccattagtcagcctccttagcggttaacaaccgagccaccgtactgatgggcaagccaacaacattgtaaaagtcaccgttgattttctcaacgagcagacttccctgtccctgaataccataagcaccagccttatcccggtactcttcggtgtctaaatacgtttcaatcatttcatgacttaacggccagaacgtgacatcagtttggacaaccgttttgcggatttcaccatcaatggataaccaaacacctgtataagcttgatgcgtgctgccactcaattgccgtaacatttcggctgcatcttgacgatcatgtggcttaccgtaaatcgtgccctgaaaactgacaacagtatcagcactgagcacagtggcctgaggattcttttgggcgatggattcacccttaagttgcgccaacatctgcacgtagtcagctggtgccgtcactggtacctggcgttcatcgattgttgcgggttggacttcgaaatcaggcacgactttttgtaaaagttcgcggcgtcttggtgattgtgatgctaagataaacattattcgccctcccaactatggtgtggatcttgaatccgtttaaacattttttctaaatctttttgcgtgtaatggattaaaaccggtcggccatgtggacagttaaacggattttccgtctgtaccagatcaaccaacaatgctttagcttgcgcatcatctaagtgatggtgtgccttgattgactgtttacagctgatcataatcgccgttttttcacggaaatgggcaatgtctaacttcccgttttccaatacagtgtcaatcatctcgcgaatcgttgcttcttcttggccttgcgcaatccacgtcggatgactatggataacaaaactattttggccgaagctctctagctgcacacccactgcggcaaggagttccttttgtgcttgaatcttaatcgcatcactattgggatattccaacacaaggggcaccaataaattctgggcgtcgttgctaacttcaccaattttttcgcgatagtattcatacttaatccgttcttgagcagcatgttgatctaagatgtaaaagccatcttcaccttctgctaataagaatgtattgtgcagttgtccaatatagcgtaacgctgggaaacgctcaatgggtgctgcatcatcttcaggttgttcaccaaacggatttccgatcgcctctgcttcgtacttatcatcccaccgggccaattgttggggttgttcaaatatcggcaggctatttaaattaggattagcagttggttctcgtttaaggggtgtttcggtttccgcaatttgtgctgccgcttgcatttcagttttaaccggcttttcaggaactgtttggggctgaattggccgcaccgtaccagtcgcattgcgccgttgactcgtaatttggtttaaatccatttgaagctggtccacatcgaccggtttcgtttgttttagattctgcactgcatcgggaattaaattctcggtgctgagtcgctcacgaattgctttttcaatcaacgccatcaaagcaggttccttactcaagcggacttcttgcttggtcggatggacattgacatcgattaacagtggatccatttgaatatttaaaacgacgactggataacggccgaccattaattttgaaccgtaacccttgataatcgccttattcaattgataattcttgatataacgaccattaatcaacactgaaatgtaattacgactggcccgcgttagtttcggtagcgatacatagccggttaatttaaaatcgagatcttctgcactgactggcaagagttgcttagccattgtaacgccatagatcccggcaatcgtctgttgtaaatcgttattacccgccgtttttaacagcaggtgatcatcattggttaacgtgaacgcaatctgaggatgactcatcgccaagcgattgacgatatcgatcacgtttgccaattcagtctggaacgtcttcacatatttcaagcgggctggcgtgttgaagaataaatcacgaaccgtgattgccgtcccagggcgaattggattagttttctgttcttctaagacgccacctttaaaatgagcaaatgtccctaacgaatcagcggttgccgtttcaatcgtcaaatcggacactgacgcgatactggctaacgcttcaccccgaaagccaagtgactgaattttgaaaagatcctggcgcgtggcaatcttacttgtcgcgtgtcgcttaaatgcagtgggtacatcttccggttcaatcccatcgccgttatcgatgacttgaatcaattgcaaaccagcctgttcaatcacgatgtcaatttgagtactattggcgtcaatcgcattttctgccaactctttgacaactgaagctggccgctcaattacttcgcccgccgcaatttggttacttaatatttctgacagttcatgaattttccccattatcgttctcctttttctgacgtgtgggtatttagtgctaaaacgtgcttttcaagctaactttctgcgcttagcgctgtgaatcaaatcatcgactgcgtcgctaattcgcttccctgtgctaatgctcaaaagttggacaagcttgaatacactcttatccgaaacgtgctttcatcaacaacttcttccgctttaccccacttgccaaatcggcgattacatcgccaattcgtcaagtgctgtaaatgctcagaagttacccgttgatgacgcactcttatttgtttaattccttttgccatttgtatagcatgtttagcgcgtctagtggtgtggcgctcattaagtcgaattgtttaaccgccgctaggactttagctgcttttggatccgcttgtggtgccacttctggttcgaatagtgaaatttgttcacccacttcttcaaccggttcagcagccggcgcgacagctgcctttggtttatcttctaattgatccaagatgatatctgcgcggttcaacaacggtgtcggcatccccgctaatttagccacgtgaatcccgtatgacttatcagctgggccagccagcatcttgtgtaaaaagactaactcgccattttcttcaactgccccgacgtggacgtttttcaatgcggttagtgaatccgctaagctggtcaattcgtgataatgcgttgaaaagagtgtcttggcatgcacgttgtcgtgaatgtattcaataatcgcttgggccaaggccattccatcataggtggctgttccgcgtccgatttcgtcaaagagaatcaagctattttgtgtcgcgttcataatcgcgcgattggcttccatcatttcgaccatgaaggtactttgaccggaaattaaatcatcggccgcaccaatgcgcgtaaaaatctgatcaaaaatcggtaagttcgcagatttagccggtacaaaacatcccatctgcgccatgatgaccgtcaaagccagttgccgcatgtacgtactcttcccagacatattcggaccagtaattaagagcatatccgtatcggtgcccatttgaaccgcgttgggaatgtatttttggcgaccgagcactttttcaaccactggatgacgcccatccactaaatcaatttcgcgactatcagtcattaatgtcggctgaacgtagtggtagttttcactgactacggcaaaactttgtaagacatcaagggccgccacacttttagcgagggtttgaagccgttcaatctccaacttaacggtttcgcgaacttgcgtgaataactcatattcaagcgcggttgagcgttcttcggcttctaaaatcaattgttctttcgcctttaattccggtgtaatgaaccgttcggcgttggttaaggtttgtttccgttcataacgcccttcaggtagcgcgtctaaattcgcacgtgtcacttcgatatagtaaccaaacacgcgattaaagccaatttttaaattatgaatcccggtaatttcgcgttctttagcttcaagttgtgctagccattgtttcccgttagacatcgcatcgcgataatcatctaatgtttcgttgtaacccgattgaataatcccaccgtcagtcactgaaattggcgcatcgggattgatggccgtttcaatgagctcgcgtacatcatcaaccggatcgagttggtctaacgcacggtcaaaggtctgatcgtcattaatgcccgttaaaatcgttttaatcgttggaatttgttccaaggaagtcttcaactgaattaaatcgcggccattaacactgccaaatgcgacccgacctgctagccgttctaggtcatacacttttgtgagggcgtcttgcaagtttgtccgttcaaaataatggttcatgaaactagcgacttggcgttgccggttttgaatcgcctttaaatccaataatggccgttctaaccattgttttaataaccggccacccattgccgtcttggtttcatccaataaccacaataatgtcccgctcttatgaccagtgcgtaaagaagccgttaattcaaggttcatcttcgcagaatggtctaattttaaatattgggatggctcgtactcttgggcccgttgtaaatgccctaaatggcgcttttgcgtcgttgccaaatacaagaccaattgtttaatcacagccagttcaaggggctgggagatgttttgtgaaacgaaactgacttcggccgttgcatcgccatcttcttgatacgacacgagaatttgttgttgaacaaacgcgtgcacaacctcactggcaacaccgtggttaatgacaacttctttggtttgtaaactcaacatttcgttgagcaataaatccaaactcgcaatctggctgactttcatctcaccagttgataaatcggtataagcaaagccaaactgatcgccatctgccaccactgctgttaagtaattattttgtttggcatggccggctttttcatccatcatcgttcctggtgtgaccagttgaatgacttcccgcttgaccatccctttagcggttttaggatcttccatttgttcacaaatagcaaccttgtaaccttgatcgactagaatatcgatgtaattttgggctgcgtggtgtggtaccccacacattggaattggatcatccgcatttttattgcgtgctgttagtgtgagttccaataattgtgaagctttgacagcatcatcattaaagagttcgtaaaaatcaccgaggcgataaaataaaaaagcgtccggatactgatccttgaccttttgatattgcgccatcattggcgtttctttcgttttttgtggcatgttgttaatccctctctcattgacgttgatctgctgctaaggtgcttaaaattgcgtataggggtgatctggtgaaatctggatcggtttaattgatttagcatgacccgttttgtcatcaatttcaattaaacagccattcaattgacccggtccttcggtcactaattcgaaccgttctggccgttgtgttttaaaccgattaatgatcttttcgcgcttcacgcctagaatcccgttataagggccagtcatcccagcatccgttaaaacggctgtgccttcaggtaagacgcgcgcatcgtttgtttgcacatgtgtatgggtcccaactaacgctgaaatccggccatcaagataccaagcaagtgcgagtttttcactcgtcgtttcggcatgaaaatcaacgaagatacagttggtttctttactaatttcagccaccatttcatctaacatttcaaacggatcaattagtagttcattcatcaaggcgcgcccttgtaagttaatcacggctaatttggcttgattgacgttaatcattgtcatcccttgcccaggcgttcctttcggaaaattggccggccgcactaattttttagcatcgtcgatgaattctaaaatatcgcgcttattccaagtatgattgcccatcgtaatcgcatcggccccagcttgtaaaagattcttatattccttttgagtcatccccttaccatccgcgatgttttcgccgttgataatggtcacctgtggtttgtattgttgctttaatgctggtaggtaatcattgatcattttttgacccattgtgcccactgtatcaccaataaataaaattcgcatgttgcgccccttaatgttctttctcagactttgatatagcttctattgtagcaatttttgcccagaataaaaagttttgctgtacccgtagaaaaacaaaaaaagccccgcgcaccgaaaaggtgagcggggctgataatgtgcttttcaaaccatgttcctgcgtttagcctaattagccaaccaatcgacttcgtcgcttattcgtctaattttgctaatcctcagaacataatcggtttgaacacacttcttcttttaacgtgctttttgaaactgactcttgcgcttagctacaatccgcaaacgatcaactccgtcgctcattcacagatttaggctaatgctcaaagtcaaaccgtttcaaacacacttctcttctaacgtgcttttagttgcaccaacttccgcttaatctaaaattggcagtcatcccacaactcgggataactgccaattttgtattaatgctcggttgctaaacgcacttctttctttaacgcgctcctcgatcagtcttttccggttaactgcaaaatgagcatcatggcaagaaccgccacaatgcccattttactgttaatcctcaaagcctactcagatcgagtcgcacttctagtgttttaagtgataactatatgttgaaataataatgttttcgcggtttgcaaatgccgttcttagtcttagacttgattggttatgcaaaatgttttgccatggttttcttggtacgaattgtgggaccaagaccgtggttgtaaagttccgtttttgcgcattcttgctaacaatgtcaacaaagcgaacaattggtttttgaattgaccggtatgatgaatggacatcgacgaaccggacattcggaaaatcttccttgaattcagcttgaatttcacgttccttggctggattttcatccgttgagacatgcatcgcaatcacataatccccgattgattgtgcgtaatctagcgcaccacgggttacttgggtcacgttgctgaccaagacaatcacagttgaaccgtcataatcatgcaagacggcttctttagcactcacgcgtagttgaagcgccactttcttgtaatgatcatgaatcttatagaaaatccaaatcataacaggcatgatgatgaagaatggccagatatcaggtaagcgataaacgaagagaatgactaagatagcaaacgaaatcaaagcgccaacaaaattggcaattgatttaccaaaccaattctttggtcgttcgacccaccacttgcgcaacatcccagattgagaaagcgtaaatggaatgaacacaccaaccgcataaagtggaatcaagcgtgatgtatccccgttaaagatgaaaatcaatgccattgaaccaatcgccaatgtaataatcccgtttgaataacctaaacgatcgccacgatccatgtacatgtgtggcatatatttgtctttggctaaattatacgctaacactggaaaagcggagaatccagtattcgcagcgacggctaaaataaaggccgttgcaaattgcacaatatagaataaaaagcctttcccaaaggtgtgttgggccacttgtgatagaacagttactttttctgctggtacaatgccgtaccagtagtttaaaaatgtaatcccagcaaagaagaaacctaagatggctgccatgattgctaatgtttcagccgcgtttgttgcacgtggcttcttgaaaaatggtaccgcattactgatggcttcaaccccagttaatgatgatgaacctgatgagaaggctctaaaaatcaacgccatcgaaacacctggtacaacagccccaacggttgatgttgcgtggaacggaatcgcacctgtgaagatcttataacacccaacgatgatcattaaagtcatcatcaagacgaataagtaaacgggcaccattaaaaatgatgctgattcacgcatcccacgtagattcattcccatcaagatcaaaacgataatgaaggaaatccctacttgatgcccatacaatgccggaatggccgaggtgatcgcttccgcacccgcggaaatactaaccgcaacggttaacatgtaatccacaagcagtgaaccacctgccactaaaccagcatttttccccaaattttcactggaaacaacgtaggcgccaccaccacctggataggcgtggatcacttggcgatatgacaaagttaatgacaatagcaatacgagcacaaaggctgcgattggaattgaataccaaattgccgcggccgaaagggtcgtcaatacgatgacgatttcttctgtcccgtaggccactgatgacaatgcatcagaagatagcatcgctaacgctttaaagcgtcctaatttttgattaccctcatcggaagattttaacggtttcccgataaaaatccgttttaactgttgcatagcaatatgacccctttaaataatatttctaacataaaaagccctcatgtgaatatcattcgtcgcaatccacacagtgacttttgaatttctctataacttaaaaaaataattgccgtttattcaaacaaatcgtattctactatagttacgcatgaattactaccacaatttaaaaaagaactgaccaaggtaatcgaaacgcctcgattccttggtcagttcttattttttatgataaacgacgggcaaaatctggtttgtaatctgaaattttagtaattcgaactttatcgccaggttgtggtgcttggataaagtagccatccccaatgtagattgcgacatggtgggctgttccaacccctccccagaataataggtcgtttggttgtaattcattgagcggtacatctttgcctaacttactttgatcttgtgaaacacggggtaatttaatcccatttttagcgtaaacgtattgcactaagccagaacagtcaaatccttcgggtgtggtgccaccccaaacatagggtcgcctaaatatttaaccgcttcttggataatcttattattcattaaatccttgttaccagtaattaatgcggcacctgcatcactcgccgctttttgagcagccgcttgcgcctctaattctttcttgaacttcgtttgtagttgcgttaattggtcgttagcttgttgtttttgttgatttaagtccttaattgcagcatcattttcctgtgataatgataccagcttggcctgttgcgcttctaattcagtcttttgttcagctttttttcagctaatgaggccgtttcagcggcattatccgccttagcgtctaacagtcgattgatgattgaacctttttggaataaatcgctcaaactttggctcgacaataaactatcgatcatatcaagattaaaactgctatctcgtgtttgtaattgccgcaggttaccttcaataatcgccacttgcttttgataatcagcagatgttttgctgaactcgtcttgtttttctttaatatccgcctgttttgcagtcatttgttcgttcaattgcgttgtttttaacgttaaattactaatattattattcaattcggatagatgatcttgtgctgtcttaatggcagtttgcgtttcttcaggcgttgcttggaccgtttgtggtcgcgctaaaaagaagccacctaacattaaacaggttatcagtatccgccggtttcgaaaaatcattgtcaacacctccaactattattataccgcaatcaaaattaattaatagggttgcgcacaatttatatatgcgcattttttttgaaaaataaaaaagttccaaaacttttgccagttttggaactttggatttaatcgtgctttttggttataacgacttccgcttaactacaaaacgagcgttatggcaaaaaccgccataacgctcgtttttaggttaatgctcagaaccaacccgtttcaaacgcacttctttacatcataccgcccattgctgatgggtccatgcctgctgctggtgctgggttgtcttctggtttgtcagcaaccactgcttcagttgttaacattaaggccgccacactagctgcattttgtaatgctgaacgtgtcaccttagttggatctaagatgccggcttcaatcatattttcccagttgccgttggctgcattgtagccgacttcaactggttgtgatttaactttttcaacaattactgagccttcaagaccagcgttggttgcgatttgacgaacaggttcttccaatgcacgaagcacaatgttaatcccggtttgaacgtcgccttcttctttaagcgcagcaacactttcgatcacatcgattaatgctgtcccaccgccggcaacgtagccttcttcaacagctgcacgcgttgcgttcaaagcatcttcaatccgatatttttgttctttcaattctgtttctgtggcagcaccgactttaatcactgcaacgccaccagctaatttagccaagcgttcttgtaatttttcacggtcaaagtctgatgttgtttcagcaatttgtttcttgatgttttcaacccgttcagcgatggtatctttgctaccagcaccttcaacgattgttgtatcatcttttgtaacagttaccttaccagctgtccctaattgatcgatagttgtttctttcaattctagaccgaggtcacttgtaatcactgtggcacctgttaatgtggcgatatcttctaattgttccttacgacgatcaccaaaaccaggggcttttacagcaaccacgttgaatgtcccacgaatcttgttcaagacaagtgttggtaatgcttcgccatcaacatcatcagcgatgattaacaaggctttaccttcttgcacgattgattgtaaaagtggtaaaacatcttgaatatttgaaatctttttatctgtaattaagatatatgggttatctaggtcagcttccatcttatcgttatccgttaccatgtattgtgacaagtaaccacgatcgaattgcatcccttcaacaacgcttaattcagtatcaatcccttttgattcttcaactgtgatgaccccatcgttgccaactttttccattgcatcagcaattaaacgaccagtttcttcgttagctgatgaaacagcagccacttgggcaatggcatctttactttcgactttgtgtgaaatttcgtgtaacttcttaacagcttctttagttgctaattcaatcccacgacgaatcccaactgggttagcgccggctgtgacgttcttcatcccttcacgaataattgcttgagctaaaacagtagcagtagttgtcccatcaccagcgatgtcattcgtttttgaagccacttcagaaactaacttagcacccatattttcaaaatgatcttctaattcgattgctttagcaattgtcacaccatcattagtaatttctggtgaaccgtaagctttttccaaaacaacgttccggccttttggtcctaatgttgttttcactgtgttggctaattggtcaacccctgccaacaattttgaacgtgcgtcttctgaaaatttaagttcttttgccataatttattcacctcaaaaaatttttttgtttattattattcaacaatagccataatatctttagcatggagcactaaatattgttgaccttcatattcaacttctgaacctgcatatttatcgtaaataacttcatcgttttctttaatatcaagtggaattcgtttgccgtcacttgttaatgtgccggtaccaactgcgactactttgccggtttgtggtttttgtttagcattacttgccaaaacaatcccacctactgtttgttcttcttcgtctttaacggcgataatcacgcgatcttctaatggttttaacacttaaaatccctccatcaattttacttttttagcactctatcatctcaagtgctaatcacaatttttatcatagcattttttcagaacattgcaagtattatgctagcacttttgcaatttgaatgctaatacgctaagctattgtcacaacaacctttgaggagctttcacatgacgctatacaaacaaaatttttcaattatcattagctatttgttcattttattgattcctagtgcagtcgtccgttttggtcatctatctgcctcgttttttctaatcacaaccattgttgattgcctcggtgccgcctggttactctatcttaatcaacgcacacaagccaatgccattgagcagcggcctttcccactcaaacccattatcatttgggggttgtgtggcattgtactggtcttagtaattcagattctcgccggcttcattgaacaaaacattctccacatcactgccaaatcgctcaacaccatttcactgatgaccatgatgcaacaacaaccgtttcttattttagcaacgaccatcgccgcaccgattatggaagaaatcacgtttcgcaaagcaatctttggtggattagccagtcgcttaaaccgcattttagccgccatcatttcaagtttactgtttgcttttttacatcaggacgggcatttgttaatctacacggccatcggtcttttcctatgttggctgtaccgcaagacaggttcgattttcaccacaatcatcagccatgctgggatgaacctgatcgtcactttactgtatctcaatcgttaaaaaaagcgttcaaacaggcggctactacgagcaacttgtttaaacgctatttttattcttgattttgttcatcagtataattatcgaggaagtaaatcaaagtttgtagttctttagccaaatcaacattttgaatccgcacgtttgatggcacagaaattcgaattggcgtaaagttcataatccctttaatcccagcggccactaattcatcggtgacttcttgagcttcatcaattggcactgttaaaatgacaatctcgatctgttggttcttcaattgttcggccatctcgtccattgaatagacaggaacaccggtttgaattgttccaatcatttcgggtttaacatcaaatgctgcgctaatccgaatattattggtttgcttaaagttgtagttcaataaggcgtggcctaaattccccaccccaatcaatgcaacgtttgtcaatcgatcttggttcaaggtcttcttgaaaaaatctagcaacgaagcgacatcatagccataaccacgtttgcccagtgcaccgaaatatgaaaaatcacgacgaattgtcgcactatctactttaactgcttcagataatccagtagaggaaattttagttttccctgaattgttcaaaaagtttaaatagcggtaatataaaggcaatcgttttgcagttgctcttgggatattattctcaaccatttgaaacctcctttttgatttgcttgtgaaaatagtgtagtaccatactgaaatcatactgaattttcttgtgaaaagcaatatatttacaattttgactgtccatcgtttaaatctgttatgatagttgacagtagtattataaaaatgaacgcaattaactttaaaaaacaccgcacgaaaggatttttagccgtgatattattacaagttcaacaagtcgcacgcagttttggcggcgattaccttttcaaaaacgcacaactcgaagtacaagaccgcgcccgtgttgccctcgttggtccaaacggggctggtaaatcaaccttattaaaaatgattgccggcatcacaacgcctgatgaaggccaaatcattcttagcaaaaatgctcaagtcggttacttagcgcaagatagtggcttagactcaacccggacaatctatgcggagatgttaaccattttcgatgatctccgccaaatggaagcccaaatgcatgaactcgagaccgcaattgcggacacaaccattgaccatgctagcgaagaatatgcagccttactaaaacgatatgaccaagtccaacacgatttctctgaagctaatggttacggctatgaagccgaaatccgtggcgtcttacatggtttccaatttccagaagacacctttgaaaagccaatcagtacactatcgggaggcgaacgctcgcgactcgcacttgctaagttattgcttgagaaaaaagacgtccttattttggacgaaccaacgaaccatttagatatcgaaacactaacatggttggaaaattatttacaaacttatcccggtgccttgctcaccgtctcgcatgaccggtacttcttagataaaatcactaaagaagtctacgacatgagtcgccacacattgacccattataccggtaattacagccatttcttaagtttaaaagaagctaacctctcactcgaatggaaggcttatgaaaaacaacaagctgaaatcgataaacttcagacctttgttgataaaaacttagtgcgcgcaagtaccacgaaacaagcccaaagtcgccgccgtcaactcgaaaagatggataaattagaccggccgcaaaacgaagccggtaaaattcattttcatttcgaaagcgaacatccaagcggtaacgaagtattgcaagtaagcgatgccgctgtcggctattcccccgataaaatcatggtacaaccaatcaattttgaagtgaaccgccacgaacgcttagccatcatcggacctaacggaattggtaaatcgacccttctcaaaagtatcttgcaccaaattccgttcatcaaaggccatgaaaaagtcggtagtaacgtttcaatgggctactacgatcaagagcaacgcaatttacacactaacaaaaccgtcctcaacgaattatgggatgaacaccatacaacacctgaaaaggaaattcgcacactacttggtagtttcttattcaccggtgacgatgttttaaaggttgtgtcacaactcagtggtggtgaaaaagcccgcttactcttgacgaaactcgcgatgaaccatgacaatttcttaatcatggatgaaccaacgaaccatttggacattgatagcaaggaagtcttggaaaaagccctccgtgaattcgatggcaccgtcctcttcatttcccatgaccggtatttcatcaatcaagtcgccactggcattatcgaactatcagatactggtagcaaacgatacctcggtgattacgattactacctcgccaagaaagctgaagaaacagcttacgcagaagcagctagccaaaacagtgcaattatccaaccaagtgccaatgcacaagatgcctacaaagcaagtaaggaaaaccaacgtgcacaacggaaactagaacgcgaagttactgctttagaagaaaaaatggccgcactagagactaaggccaacgcaatccaagaacaaatgacccaagcagacgtaattactaaacccctcatgcttcaagaactacaacaagacctagaaaaagtccaagctgaactcgctcaaacagaatcagactgggaagaacaagcgatggcactagaagaactaacacaatagagtgcgtcaagagccggttatgctgcgagcatcagcctaacaaggcgaatgcttgctacaagcaatcgtttgacttgtgtagctaagcacagaaatatgcctgcaccacataaaaaagggtagcgatcaatatcgttgcccttttgcattttaattaatttgtttgccgaacggacttaacgataacgccgctagcttaaagtgttgccggccaaatggaatcccaataatcgtaattgataataatagcccccaaaagacatggctcgcccacatcacaagaccacctaagaaaaaccaaacaatgtttaataaaaacgaacctgcaccccccgttgaaacaacggttgcgttaaacggcatcaaggtcaatgcgccaatcttaaaacattgtagcccgactggaattccaataatcgtaatactccaggcaatccccagaataaaccaaccgatagcctctactaatcccccgaatagccaccaaattaatgtaccaattaaactcattgaataaactcctttatacttgattaccttaattatacctgattcataaacaaaaaaagcggtagccgcctaaaaataggtcgctaccgcttttcttaatctttttttaaccgattaatgctaacgcttgtttcaagacagtttcgccgtccatcatgccgtaagccttcatatcaattacttcaacaccgattccttttggtgccaatttttctttaaattgaccttccatgaaacgaacttgagggcctaatagtacgcagtcaatttttttagattcgagttggttgtctgcatctgaagcgccagttgcaaaaatttctgcgtctaaaccttgtgcttcagcggccttttgcatctttgaaactaataaacttgttgacatccctgctgcacaacataacatgattgttttttctgccataatgaattaccccttaaattttaattggttagaaagcgataaaaggcttataaaaagcgttttcatttcctctatgtttttagtataagcgctttctttattaatgtcaattaatgttatttaaaaatatataagccgcccattttgttgacctatcccaatcattaacctgtcacctgttattttatcgcatgaaaagtattttttatgctccctactaaacacaaaaaactgctaaccaatgcctaaaaatcgtcggttagcagcttttagctattttattgtttagtatagaatcgttttaattttgtctggcaacgcgattgtgcccgtttcatctgttcaaacgtgcaatctagctggctacacgcttgctcaactgctagttgccccgtcaaaacccgaaaggccactaactctaaagcagatagtgtctctaagtacgcccgcatttcaaccgttgactgatagtatgccacggtatcttcagcgagcgcattgcattccggacaacaatcaaataacagggcttgctgatcgacccgtcgtttctgagcaagttctttgcgaatcaagtttaatacgtggtggtgaaagcgtaatttataaaaaccaccaaaacttttgccgcaattttgatcataacactggcaagtctcataacagacgattcgcgcttcttgtaaccaatcgtcctcatcaaataagcgaatataatatggagtaaaggtgcgataaaccattggtaggtaggctttaaataaaacatccaacgcctcagaatcgttttcaaccaccgcttgaattaagtttgcatcacgttttgctaattccatcaatgaaccacctctcacgcaaccccacgcctttatcttaacaagttatcgtacatttattaagagaacgtttgtttaatcatctttttcagcacttagtgcatctcgcacctgtgcaagttgatctagttgcgccggattccacggcatattccgttgcaaggtccgatcatgataatgcttggcatcatggtcaatttcacggtgcgttcggcgaatctcacgataaaaatcgtgcgaagacacccgcaatgcgccccgtgaaaaaatcgtccactgctcagcttgatcactcgaaaccaccgtcacttgcgtaatcggcgacattaatttacccgctaagccttcgatataactgtccgctgtttcatcctcatctgtgaagacaacttccaaattatactgcacataactttgtttaatccctggcacatacattgcatcaaatactaagatgacttcaatctcacgaaacttgcgatattctgataatatctgcaataagcgatcacgcgcatccgcgagatgatcattttgtttcaacttattcagctcgggccagttcccaatgatattataaccatctgcaattaagatctgttttttcatctgctataccaaaggttgacggctattataagcctgatacattaaaacccccgcagcgacactcgcatttaaactttgcacatgaccgaccattggaatcgtcaacgtttgatcaacttcttttttaacaattggtgaaagccccttgccttcattaccaatgattaagccgattggtcctttagcatcccacttacgatagtcggtaccagccatatcggtgccaaaaatccaaagaccacggtccttcaatttcttaatttcttgtgttaagttcgtgacacgcgccactaggatatgttcgatcgcaccagtcgatgtcttagcaactgttgatgttaaccccaccgcacgatgcttaggaataataatcccatgcacaccaaccgcatcagctgtccgcatgattgaacccaagttgtggggatcttccaagttatccaagattaagataaacggttcttcttctcgggctttggccttagcgaaaatatcatcaacactcgcatattcaaacggtgcgattgctaagataatcccttggtgattttgacggtcactcaataagtccaacttatttttaggcacattttgaatgattagacgtttttctttcgctaatttcacaacatcgtggacaaagtcagccttcaagccatcttgtaagaaaattttattgattttcttcgcatcactggtcttcaatgtttctaaagaagcgtgttttccgatgacgaaatcagtttgttcttcaacaactgcttcttcgacgggtgctgctggtttcttgttagctggacggcgcgttggctttgccgaattattggccgtccgacgactattgaattcgttgttcttttgtttgaatggttggttattattttttctcatgggtcctcccagcgtcgacttgttgaatacaccagtgggctaattcagcgacgcgctcttgttgttcagttaagtatagatagccaaaaactgcttcaaagcccgttgaggtccgataagtcgaaacactcgtattcttggctttcgtataacttttggcatttctaccgcgtttaaaaatattcatttcttcttctgttaaataattatcatcgatcatcaaaccaatcaaagcagcttgcgctttagccgacacataatgtgtcgccacttgttgcaagcgcgttggtttggttaaaccgagttctagcaaatgggcgcggacatacacttcgtaggctgaatcgcccatatatgccaacgcaatcccgtttagttgtaaagcatttttcatgcgcgtctccatctcattccttgtggtgtatcttccaaaataatcccttgttctttcaattgatcgcgaatcgcatcgctgcgggcaaaatcctttgctgcccgtgcggctttgcgttcttcaatcaagctttcgacctctgcgtccaacagttgggccgccttaaactcaacaccaaaaatggctaacaagcgcgttagacgggtagttaaatccactaacgtaccagcttggacggtagcccgttccaggtattgattactaagcttagcgagttcatacaattctgttaacccgttttgcacgttaaaatcatcatccatcgctgtcacaaaggcgtcttccaagcttgccgcttgtgcggcaatgtctgcgtctgcacccgcttcagcagtcgcttggcggaacgctaagttatcgagggtcgtttttaaacgatccaggttcgtttgcgcttcagctaataatgattcactgtagcgaattggtcggcgatattgcgtgctactcatcaagaaacgtaatgcttgtggattaacttcttgaatcaaatcatgcaccgtcacgaagttgccaagagacttactcattttttgatcatcatccccgactgtcacaaagccattgtgcaaccaatagttgacgaaatgtttaccagtcttcgcttcactttgagcaatttcattttcatgatgtgggaactctaaatcttggccaccgccatgaatatcaatcgtgtcgcctaaatatttggtcgacatgactgaacattcgatatgccagcctggtcgccccttaccccaaggtgaatcccaagcaatatcggtccctttttctgacttccaaagggcaaagtcgattggatcttccttacgtagggtttcttcggttgctgtatgttcgctggccccttgttcgagctgatcgatatcttgaccagctagatggccatagtccttaaatttacgagcacgatagtaaacatcgccatcaacggcataggcataatctttagcaattaagtcttgaatgaacgcgataatttctggaatgttttctgtcgcccgcggattgagtgtcgctgtttcaatattaagtgcttgggtgtcttctttaaaagcggtgatatagcgttcagctaattccggaaccgtgatttgttccgcattcgcagccttaatcatcttgtcgtcaacatcggtaaaatttgagacataatcgacttgatagccacggtattcgagatagcggcgaatcgtatcaaaggcaatcgcactgcgcgcattaccaatatgaatatagttatacacagttggtccacagacatacattttaacgcggtctgcttgaatcggtttgaagacttctttttgacgcgtgagggtattataaacggttaacatcgaatcttcctttcttaaacgtgctcttgcaggcttatttctgcgcttaaccaaatttgcccaatcggcgattgcatcgccaattcgtcaaatccagttaatgttcaaaatataaccacctgctgtcgtactcttcttctaaacgtgctttttgaaactgacttctgtgctttgctccataccgcaaacgatcgccggtggcgctccctcacggtattaggcaaatgctcgaagtcaaaccgtttcaaacgcactcttccaaataaaaagcgtcctttgttggttaacaaaagacgccgattgagcgtggttccacttttctttgcaaaaatgccttgaacaggtaacggtgtcccggctaagtcacaaagtgacttggcatttcagaggtgcatttcgatggggcaatcggctttcttccagcaattcgaaagctctcttaacaattggcatcatctacttattctcttcatcaattttaacggtttagttggtctccatgatacagattattgacgaccgtgtaaagtgttctgcgtggctatttttctttcaagcctttttgttgatgcgctggtctagcaaaaatcatccgccccgcagcggtttgaagcgcacttgtcacaatcacttctagcggtttatttaagtaatgttggccatcttcaacaacgatcatcgtgccatcatcaagataggcaaccccttgttgccgttctgttccggctttcaccaccgtcacggtcatcgcttctccaggtaaaactgcaggcttcaacgtattggcgagttgattgatattgaagaccggtacgttttgaaattcacagaccttgttcaagttataatcattcgtcacgacaatcccatcaagtaattttgccaatttaacgagtttactatcgacttccgttaaatcctcgaaatcaccgtcgtacatttcaacagataagctatcgtctttttgaatatcgtttaagatatccagtccacggcgcccacgtgcccgcttcaaattatcagcggaatctgaaattaattgtagttcatgtaagacaaagtttggcaccatcaatgtgccttcgataaagcccgtcttagcaatttcttttattcggccgtcaataatcacacttgtatctagaatcttatacttacggaaattatcgccgactttacgttctaatacatcagcattgcgtttcttaggttgcatcaaacggcgccattcttccattcgcgttgtcccaattcgaaagccgagataccctaaagcaatcatcaataaaatgggtacaactgtatttaatgcaaaaatgggcatccggtatagcggaatcgaaacaacgtttgctaataacaatccaattagtgaaaaaacactcccaaataaaataaaactaggtgattgtttcgttaaggctttttcaagccggtgcatagctctcaacattggtgttgccagcgccaagaataatagatagaaaataatggcccctaaaatggcgttagtaataccgttattgagatacatcatgtcttccaaatgaactaatggccaaaatactgggaacgccgtaattccaagcgcacctcctaagataatgaacacaattcctaatattctttttttagtaaatcgtttttgttgcatcgttcaacctcctctcgctccaacttatgcctagttgaatactttctttaaagtttctgcaatcgtggtcacaccaatcacttgaatatccgtcggtgcgtcccacccttgtaagttattctttggtacataaatacgtttaaagcctaatttagcagcttcactgacgcgttgttcaatccggttgacccggcgaatttcaccagtcagaccgatttcaccgacgaaacaatcagttggtggaatttctttatcccgatagcttgatgcaatcgaaacagccatcgccaaatcaatcgcaggttcatctaatttaacaccgccagttgcttttaaatacgcatcttggttcgataacatgagactagcacgcttttcaagcaccgccataatcaaggagactcgattatgatctaaccctgaagacgtgcgctttgcattcccgaatagtgttggggtaattagggtctgtaactcaaccaagatgggtcgcgtgccttccatcgaaacaaccacggctgaacctgtcgcccctgccaaacgttcttctaggaaaatctcggatgggttcgcgacttcttttaagccggcttcacgcatttcgaaaatcccaatctcattggttgaaccaaaccggttcttaaccgagcgaagaatgcggtaagtatgatgcgtatccccttcaaagtacaacacagtatctaccatgtgctccaaaatcttaggaccggcaatagcgccctctttagtgacatgcccaaccacaaaaatcgtaatctggttcgtcttcgcaatgcgcatcaattcagcggtgacttgacgcacttgtgaaacactaccgactgcggaagtcacttctggttcgctcatcgtttgaattgaatcaatcaccacaaagtcgggtttcattgtttcaatctgatgccgaatattgcccatatccgtttcaggatataagtaaagttgatcgccattcacatcaagccggttagcccgcatcttaatctgggatgcactttcttcaccagaaacataaagaatcttaccaaccttttcaagttgtccggaaacttgtaggagtagcgttgatttcccaatcccaggatccccaccaattagaatcaatgagcccggtaccactccaccgccaagcacgcggttgagttcgtttaattcagttttaatacgcggttccttttgaatattaacggtgctgatttgttctggttcagttgcccgccctgaaatcgtaaaacttgatttcgcgctagctgcaggttgttcacgttcttcgaccatttggttccaagcgccacaattcgggcaccgacctaagaatctcggggaactatagccacaattttggcaaacaaactgagtcttaattttagccacaaagattctccttcattatcgagattagttttattttaacataagtttgtgaattttcggcgacctagcgattaccgtttagcgaccagatgagccaaacccacccgttcgtttggtggttaccgtcgcttcatcatctgcgactaaatatggcatgaagatgccttgtccaattcgttcaccttttttcaagataacatcccgcggactgaagttaaccatttggataaaaatttcaccttcgttggcatcattgccgtagtaatccgcatcgataatgccgacgccgttgggtaaaattaacccttttttgagtgggttgcttgaacgattggcgatcattaaatattcgtcgtcttgcatgtaagccttaatcccggtcggtactagaaagggtttcaatgtttttgatgcacgttcaaaatcgtcatccactaacggtttgccatttcgaatcattcggaacaaacgcacaaagttgtaatgccagattgatggcaacacgaagtcctccgcacaagcaaagtcgtagcccgccgaatgcgctgttgaacgcaccggtaaactcaatcccgcctcttggtatttggtcacaatttcaaagccgcgttttttcattcctaaaactcctaatattatcgcccatttgggttctttttgtaccactgtatcataccatgaaaccgcggaggctgtgaataatgcctaaggctgatttaattaaaaatttaacaaaaagcgcccaattaaagcgtttttttcgtataatagatttattaatacaaaaggggtgtcttgatggataagaatgcaatgaaaaagatggcagctgaacgctcagtggattttgtcgaagataacatgattttaggactcggaacaggttcaacagtagtttacatggtggaagcccttgcaaaacgggtacaagcagaacacctcaacttaacatgtgtctgcacctcaattcgtactgaagaacaagccaaatcacttgggattccggtcaaagcactcaaccatgtcgaccacattgatttaaccatcgatggtgccgatgaagtcgatgccaacttccaagggattaaaggcggcggtgctgcgcacttattcgaaaaattagtcgcaactacttcaacccgcaacatttggattgtcgatcaagaaaaagtggtcgatacaatcggtcgcttcccactaccagttgaagtgattccatttggcagccaacaagtgttcaacaaaatggctaaagaaggcttaaatccagaattccggatgactgcagacggccaacacgtcttaactgattctaaaaactacgtcatcgatttacacctcaaccaagtccaacatccccacctactggcatcatggctcagtgaacaagtcggcgttgttgaacatggcctattcctagacatcgtcgaccaagtcgtagttggcgcacctgatggcgtgaagattttaacagcaaaataaagcgtgcgtttaaagcagatttgacactgtgcactagcacagtgttttaaatgaccgacaaaatcggtcgtttgcaatacgtagctaagcgcaagcgtcagctttaaaaagcacgtttccaaacgaaccctcagcggttcgtttttttgtgtcccgtgctctcatataaatcgttttctttcacatttatcaatcaccattcttttagctttatccccgttattcggtttacatctcccatctaatcaactagaattaaactaattcaaaaattaaggagtgattagatgacccaagaaattacacataataatttaatcaagatgcggaccgctttagctggcgtgccacaagcaacgacgctcaaaaatgctgtgatgacgaatggcattaacgccgttagtcaacgccccgatgctgccgtcacccttgatccaacctactcaatcgacctccccactggtgatgtcagctttcaaaaaaagagtgggcggtgctggttatttgccactctaaatacattacgccacgatttcgaacagaaatatcacgttaagaatttcgaactctcccaaaattatctatctttctgggatcgcatcgaaaaggcgaacctcttttatgaaaagattttagcaactgccgacaagccgattacggatcgcgaagtcgccttcaccctcgctggtcccgattttgacggtggccaatgggacaacgcagtggcactgattcaaaaatacggtgctgtgcccaagtcggtcatgcccgaaacttataacagtgacttaaccactgaattcaacagcactcttaatttgaaactgcgcaaagatgcgattcaattacggcaacttgttgctgacaacgctagcgaaacaaccatcagtgaaacgcggactggtttcttaagtgaaatctatcggctatgtgtttacgcattcggcgaaccagtcgaaacgtttgacttcacctatcgcgatgacgaccaaaattaccatgaagaccgcggtttaaccccgcaaagtttctatcaaaaatatctcaatcgcaactttgacgactacatcaccgttgtcagcagcccccaaacaagtaaacaatacaaccaactctacagtttagaatcgcaaaacacggtagtcgaaggtcacccaatgcgcctcttaaacttaccccctgaacgtttaaaagcactggctatccaatccttacaaaacggtgaaacaatttggtttggcaatgacgtgctcgcggatatggaccgacaaaaaggctggcttgatcgcaacctttacgactattctggactctttggtttcgatttgacgatgccaaaagaccaacgacttgactaccgacaaggcgttgtttcccacgcgatgaccctcaccggtgtcgacctcgtaaacgaccaaccaacgaaatggaaagtcgaaaacacatggagtgccaaagtcggtacaaaaggttacttcagtatgagcgacgcttggtttgacgactacgtttacgaggtaattgtcaaaaaagcgtaccttacaaaagaagaacaagccgcactcacaaaaaccccaattaagctagacccatgggacgcactgcaatagagtgcgtagtaagccgagtttatcctgaggattaacacagaacggcgaaggattgcgccagcaatcgtttgacgttcagggttaaccggaaggatatggcttacggagcacgtttcaaatcagagtgcgccatcaacgggttacttctgagcacttacagcacttgacgaattggcaatgcagtcgccgatttggcaagtgaggtaaggcggaagaagttgttgatgaaagcacgtttcaaaaaaataatgccattcaaaccgggtaatttaatttaacccaccaaattttagaggaggttttccacatggttcaacccattacagcaaaagatattcaacaattcaaagccgatttcaaggcaacaccacaatccaacacaattaaaaatgccattatgaacaacggctttttagccacgagtgctaataccgattcaaaagccaaaatggcccccgttttttcaatcgacttagataccggtgccgtttccaatcaaaagcaatctggtcgttgctggatgttcgccgcgttaaatacaatgcgccacagcctccaagaccaattcaaaattaaggatttcgaattgtcccaaaactacaccaacttctgggacaaattcgaaaaatcaaactacttctacgaaaacgtcttgaagactgccagccaaccaattggcgaccgcaaagtcgacttcttaatgacaacgccccaacaagatggcggccaatgggacatgctctgcgcactcatcgaaaaatacgggattgtacctaagtcagtcatgcccgaaacatataatagtgaaaaatcaagcgaactcaacggcgttttgaaccttaaactccgtaaagatgccgttacattacgccaattagtagccgacggtgttagcgaagccgacatccaagctaaaaaagacgcgatgttaaccgaagtttaccggatgctcgtttatgcattgggcgaaccacccgttgaattcgactttgaataccgcgatgatgatcacaactatcacatcgaaaaaggcctcacaccgcaaacgttctatcaaaaatacgttggttgggacctcgaaaattacgtttcattgattaactcaccaactgccgacaaaccatataaccacttatacagcgttgaaatgttgggcaatgtggtcggtggccgtgaagtgcggcatttaaacctcgacatcgacaccttcaaacaactcgcgattaaacaactacaagcaggtgaatccgtttggttcggtagcgatgtaggccaatcatctgatcgcaaactcggcatcatggacactgaaatttatcaaaaagatgccatgctcggcatggatctttcaatttctaaaggcgaacgccttgattacggtgaaagtctcatgacccatgcgatggtcatcaccggtgtcgacctcgtcgatggtcaaccaaccaaatggaaggttgaaaactcatggggtgacaaagttgggacgaaaggttacttcgtcatgagtgatagttggtttgacgaatttgtttatcaaatcgtgatcaacaaacgcttcttaacggatgaaatgaaacgcattgaaacagaagaatacgatcacccaaccgttctcgcaccatgggatccaatgggcgcattagcaagtcgctaaacagtaaaaggggctgagacaaaagtaaattttgtctcagccccttttttgatattagaactttaatcgtctaaacgtgttcttataagtcatccccttccggctaatcctcagggtatcccgacttatggcacacgcttttttatgttccagtaccgactgcgagcaagctatcataataaatctgcatcatcatttgccagtcactgaattgaagccattcatcccctttatgggcaatccctttttgacctggaaatgatgggccaaacgcgatgatgttcggtaacgcgcgcgcataagtcacgcacgttgttgtgaccggtgtgccatccaaaccagtatctgccgcataaatcgcagagggttgttgaataaatggcaatgttggatcagtaacttgcgatggataacgccgtttaaccgtcaacgtcatccccggcaacatggcagctttaatcccagttaacaactgatcttccgtcactgggattgggtaacgacatgtcagatgcacacttaactgttgggcttcaatcgataccccataaaaagcaagttgcaatgctcctgatgcttcatcttgataattaatccccaagttttccccagttgactgcgtcccgattttagcggctacccattgataaaattgacccgtttgaccagtgagttgacttgcatcggcaactaacttcggtaacacattatccgccatttcgggggcattgctaggtgcctttttgccgtgataagttttaaccgtgccatcggccaaaatcagctgtgcatgatctggcagataacttttagcgaaccgtccttcaatcgccgtaatttgttgctcagagccgtccgtaatcggtaacgctaactggacatctaacaagccccgttcgccgtagacggctggaaatttacaatctggtgtgaatccggcatatggtgcggaatgttccgccaaataaattggcatatcctgactcccagattcctcatcagtgccaaaaataattcggacgcgttgtttaaatgttatcttttgcgtcttaatcagatacagggcaaataatgtcgataaaagtggtcccttattatccaaaacaccacgcccatacagcatattatctacctgagtcagttcaaatggtggataatgccaatcatcttcaacatccacgacatctaaatgaccaagaatcccaaaataagttggcgcttgcgtttcgtctggtccatattctgcccagccaacacaattgccgacttgccccgtcctaaagcccattcgatcagcaatcgccaacactgtttccaatgcgcgtttcggaccaattccaaacggcgcttcaaacgtttgcgctccacacacactcggcacgcgtaacacttcccgcaagtccgctaagaactcatcagcatgtgcttgaaataatgccttaaaatctgctctaatcggtttcacaagaatggcttctttctattaaatttcgtcaaaattaatatcaacatcgtctaagccagccgcttcggcttcttccgccaaatactgccgatcaatcatcatgataaatggatagtaaattaaaattccaagcactaattcaaataattggaggactgaccctgtccaactcccagttgaaagccacccagaaataatcggtggtgttgtccatggcaacataacgccatttgtatacggtacccatccgagttggaatacaatccctgaaatcaatgtatttaaaaccggtacgataatgaatggaattgcaataattgggtttaaaacgactggcaaaccgaagataatcggttcgttaatcccgaaaataccggggacaattgccaacttacccaattctttgacgcgttttgacttgcagacggttaacatgaggattaagagtgagagggtactcccaccgccaccgtatgtggtgaagatgtcaataaattgttgggtgaaaatatgtggtaactgcgtatgattctggaatgctgttaagttatcttgcgtcagaacgaagaaaattggtgaccacacactgttggtgatagttggaccattaatcccaaaacaccagagcaacattgcgatgaagttataaagcaatacagatggcaatgagttgccggcaccttttaacggttgttgcagtaacgtgtagatggaattgtaggccgtttcgaaactcgaaaggctaaaaccaattcgaattaagaagaaaactaataccactaagccagccggtagtaaggcatcgaatgattcactaactgcaggtggcacaccatctggcatcttaattcgccagttgcgtttaatcgcaaaacggtaaatttcaacactgactaatgcgataaaaatccctaggaaaatcccgttaggtcccaaatacattgtttgaatggcaccgattgattttttaccaacggtgacaacagtcggtgtcaaaattaagaatgaaataatagcaattgcactggtatgaatcgcttgtaaccctcggtttttaccataggcataggatatcccaaaacaagcaagcaaccctgtaaaactaaacactaaattagaaacagcactaaaccattctgtccagtgcggccctaaaatcccactccaaaattcagtccaaccaggaattggaaaattcccaatcagtaagaaaatcgatgtcacgataatcaatggcgtaatgattaagaaaccatctcgcaatgatcggagtacaacattattccccagtttaatcgcaaccggcatcaaaatctgttcgagtttcttttgcatcggttttgcctccttttaataacaatattggttaataaaatcagtaaaatcagcgccttcaaccttcattttgcataactgcaatgcgtggtcgattgaatccgaaagaccagtaccacccttttttggcatcttcacaatcgttatttgatcttgatactgttgaattaaatcggcattcttttcgatcgcggtcagcccaacaaccggaattgttgtttctttttgaatagtggctgctaattcacacgccatcgtcgaaaagtcccgataatcataggtcggtcccgcaatcacaacgtctgcacccattttctcactcatcttcgcaactttccgattcacttcggctttgttcgcctgataataatcagttccgcaataaaaggtcccgataatttcagagtccattttttttaatgccttatcgagcgtatccgcagcacccatcgctaattttttccacctaaaggggtatcccctttttccttaccacctaatccagcttggatttgatccaacaagacaattactttcgtttaaaaccctccttttaatgttcacgttgcaagatgttatggaacgtgtatttatcagcacgataatgcgagttatcataaagaattggataaccgtccattgaatacgcaaccgtgtgggctagaaaagcgggttgccctggagaggtctcaagtaagtcacttaagcctttttccaatacgactgcttcgagttcttgattggcatacccgattgggattgtttgctcaatcaagcggtagagtgacccttgtgcctcatgggccgttaattctggtagaattttttgtttcagatagatttgttcgtgggtcatcgcttcaccgtctgccattcgcaagcgttcaatctgccaaactggctcctgtggtgctaaatctaacttggaggccacatagtccggataaacgattgtccggcgtaaatctaacacccgcgtgctgacatccaattgaaactgtttggctgcttcggtaaaaccaactaaaccagatgaaccactcgaaattttactttatgttgcaagtacataggtgccacgatttcgatcgcgtaccacgacatgttgtttaaccaatagatcgattgctttgcgaattgttagccgcgtcgttgaaaattgattggctaaatccgtttccgatggtaatttctgatggatcccatagacccctttttgaatgtcatctcgtaaggcttctgcaatttcaacgtatagatacttaaccattccaaccacttcctctattcaactggtgctttaatccgtttcgcgtaggcttcaagccattctgctgaaatgggttcgatcaccgtcgtttgacttgaccctggattagccataaaaatttgtggtgccgcatcttgattgccagctgcaaacgtaaactcaacgttcgtcgccacgccccattcaccttgattatttaaggcaaccaacgaaaactcgccagctttgccgtagcgtttttttaatttctcaacaaacggatagactgcttgatcacacgctgcttgtggtgataaaccggtccccatcaggcgcacaatctcatatgaaagacagcccttcattaaatcttcgcctaacccagtagcggttgcgccaccgatttcgctatccacgtaaaagccactgccagataatgcagaatcaccagtccgccctggttttttcataaataatccagaagttgacgtccccgctgccataccggcagcttgatccaaactaaccatgccaactgtatcgtgaccatcatatgggctaagatttttttcgttaatttctttaattcgttgcatccagattttgtgtgcgcgttcggtcaacatattacggctttcaaaaccgttaaacatcgcatattgtgacgctcccgcaccaaccaagaaactattaaaatgatcgtcacttaattgacgcgcaactgagattgggttcttcacatcactaattcctgcaacagcaccaattgcaaaagtgttgccatccatgaatgccgcatccatctccactaagccttgcgcatttggcaaaccaccgtaactgaccgatttaaagaaggggtaatcttccacttttttgatagcggtttcaattgcatccgtactttgcccaccattttttaaatcagccatcgctttttgaatcccttcaaaggccattcgccaagtcccaatcattgcatatgtcataactctcatctccacatgtaagcgttttaataatcacggtataatcaaaattgtatatacaatcaatactttttttgaaataaaaaagccaccgcagtgacttttcatttaaagatagaggccaatcaacattcccactagccaaaaaccgttaaagacaattagattctgaaccgctgtaccaaatacaacgcgtttttcctgactcttctgtaatgcaaacccattacgtaacaaagttgggccactcgcaaaagctagcgctgctggccatggatataatttcaggccaatcccaacaataatcaccacgtaacaactatacgcactaagttgataaagttgaatgccgcgcttttgaccaatgtaactgattaatgtgtgccgcccattctctaaatcgactgtgtaatcacaaatattgttcattaacatcaaattagcaatcaggaagacagttggtaaactcgccacaaacaccaaaatcacattcagccaattcagttggaataacattaacggcccatcaaagcgcaaatcgaccaactgatccgccggaacgttgacatacaccgtcaaaaagaaattaccgaaccctaataccagactcgataacaactcacccagtggtaatcgtgaaattgggaatgggccgtaagtatataaaatcccgattaagatgaacagaacactgatggctaacacaattaaatttgtgcgccagaccagaatcagccccagaacggttgccgtacttataaagccgatcaaccagcgtaaagcaaccttaggggcaatatcttgtcgtcctaatgcactggttgattgctggagcgtttcatttttagcgaggtgaaagtcgttgtaattattccatcccgttgtgaagacatcaattaacaccaatgcacagaagtacaacacggtattgatcggatcaatttggtggaaataatacaacgtaaaaaagaacccagccataaagggaatcacgctaccaactttagtgcgtaattcgataaaatctaaaaacgccttaacagacatctattccgcctccgataacattcaatagtcctattctaacagagaatgtctaacaaataaaaaaagagtcggttggaacaaaagtaacttttgccctaaccgactctttcaacagccgaaatttgatcatctaaccatgttctatctgaacagatcgcatacgctgtttgattctattttgttttcaaatcttcaatcgaattaatattcgtcatatacttcggtacagctaaaccgaccttagcaccctctaagttcggacctaagtcttcaaactgacctttgtaatccttgtagtataaaccagaggtcttcggtaaccatgcggaaacttgtgcatcggctgctttagttgcgactgacgcccacatcggttgaatttccatagcttgaatcgttggttgataaccttgttgacgtaaaacttcagccaccacgttagttgacgcgatttctgaatcccaagccacataggttaacttaattttcgtgccatgaacctttttaacacccttagtccactcagcaactttttctggattgtcttgaatccaatcgcgcgccgccttttcaggttcaacaccgtcattgactttaagcattacggtcgacatttcctttggcgtccaatggaatcgatctaagatggtatatgcttctggcatatccttctttagccccttacgaacaaccgtattaatgtgttcagcttgaccaaaaacatttttggggtcttttaaaaacttgattggatatttagtaaacatccaatgtggttgccaaccagtaatgacgattgggcgtttatccgcaatcgctttgtctaacgtactggtcattgccgcagttgagctggtttgcaactgccagttctgatcattcaaatgatacttgttaattgcagtttgtgtggatgccataatcccagcacccgcgtcaattccggtaatcgtgtaattaatttgaccgcctaatttctcatcggtagcgtacggcttagtttgcgaactgcaggccgttagaagtgtgacgagccccactaaggtgaaaaaagctattaatttattcttcttaatcactgaatccctccttaatgtttacgttgccggttcaaagcttgggttaaacgatcaataataatcgctaagattacgattgccaagccggctgcaaaaccgcccccagcatcgttccggccaacagcaaagtaaactcgtgttcctaagcccattgctccaatcattgacgcaatcacgaccattgataaggccaacatcatactttggttaaccccagccattaaggtcgatttcgccaatggtaattgaaccttaattaacttttgccattcagttgagccatatgaatcagaggcttcgatcaattcggttggcacttggcgaatcccaaggtttgtcatacgaaccgttggtggcatggcaaaaatcactgatgcgaaaacgcccgggaccatcccgataccaaagaaggcaacggctggaattaagtaaacaaatgccggcattgtctgcatgaaatctaagatgggtttaaatattgcctgggcaatatcgcttttggccatccaaattccaagtggcaccccaattacgagggaaatcagactcgaggttaacactaacgttaacgtttgcgtcatatcccgccagaaatcaaggttccaaatcaagagtaggccgaggacttcaaagataattaaaccccattttttggtgtcgcgattcgctaaataagtgacgccagcgataatcacgatgaataaccagatggggattaaatcaaacacccattggaaagcgttgataattccgccaataaaattcgttaaaccattaaaaaagccagtaaattgtgtcagccaatcgacaaagtgatccatccaattggcaattggtaatttagcaatcgtcattaaattaagcaaaatggttcacctcgtttcctgcaagtgcccctaagacggccccgcgaataataatcccacgtaattgttgcttatcatttaagacagcaaacggaatgcccgtttgcgaaatatcatctaagatatcagcaattggtgtctcttcatcggttgttggaacttcagtattcacgattgattgcaaatcacgactttctttgcggactaactcaagtacatcacgcgcatcaataatcccaactaactcacgtttactgttgacaacgtaagcattagaaacttcattttcacgcattcgttttaaggccaaacgagggccatctttttcaatattaacagtcgttgggcgaatcataacgttgccggccgtgtaaactttactacgatcaacgttttcgatgaatttctctacatactcgtcagcaggccgtgtcaagatatcttccggtgtcccggtttgaacgatttccccatccttcatgatcatgatgtggtcgccgattttgagcgcttcatttaaatcatgactaataaagataattgttttgtgcatcgtttcttgcaagtcgagtagttggtcttgcatgtcagaacgattcaatggatcaagcgcagaaaaagcttcgtccattaataaaatctcagcatcattcgctaatgcacgcgctaaaccaacccgttgttgcatcccaccagataattgtgtcggatactgaccgccataaccatttaaaccaactaaatcgagtgcttcattcgctttttgttcccgtgtcgccttatcaatgccttgaatttcaagcccatagtctgtattttcaagaatcgttcgatttggaaagagcccaaaattttggaataccatgctcatctttttacgccggacttcacgtaatgccttcttatcaatctgcattaaatcctcgccatcgattaatacactaccttcagtaggctcaatcaaccggttgatcatccgaaccaatgttgatttaccactcccagatagtcccataatgacaaaaatctcgccagattctacttcgaagttagcccggtcgacaccgattgtcgcacctgtttcctttagaatcgctgcttttgattttccttgtttcagtaattctttggcacgcggcacgcgcttaccaaatatttttgttagatttttgacttgtaatttgacagtcatagaatccccctttgatttcattttctgaaaactatatctaaaaagtatacaggtttattgtgaaagttgcacaccgtccacttttattctcattttattctaatgtgatagttaggtaaccaactttctttaaaaattaagaaatcgctagatggggctttatgttagtctttaaaaatcagattagttctaaaacggaaccaatctgaaaatgcaactattttcctttgtacattaaaattaaatgagaattaatcccttttaaaattcacaagcccttaattaggccatcaaaaaaaagcgttgaccaaatcggtcaacgcttttaaaaaatttagccatgtactgcttttcgttgatagcgatgatacaaagcaagggccataatcgtaaagacaatcggaccaatgaccatccagaaggcatctaaatattgaccttctaacatcggttgaataatcgtaaaggcaattccgaagacaaggactaagtcgaccacaatcgtcaccgccttaacagcaactggtgatttaaagaattcgtaaggccgttccaaatctttgcgtgccttgaaatatggaaaggcagtcactaaaaagaggtatggcaacgatgttgaaacgttagacatcaaagtcaagacattatagaagtcaccggcagctttaccaccaaatgaaataaccgcgattaaaatgcagactaataatgcttgcgcccacattgctttttcaggcatgccatgcttgttaacttctgcaaagccgttcggccagagtgctttaggtgtcccgagtacaaatgactttaatggtgaataaatcaagacggcaaatgcgcctaagtaactgataaacatgattaaaccggtaatccgagcaaaggttgttccaatcgtcatcgcaacgggtgtcgtcatcccaaaggcatggccgaattgataacccaagttttgcataagaacataagtaatattgcccatgttagctttattcccgctcaagacttgttgccagttcgttgagatgccccacataaagattgcaaccgcgtagattaatgtaatgaagactgtcgcaatcattaaccctttagggaaagtcttttcaggctgatccatactatcggtaacaccgcccatggcttccatccccgcgtaagcaaagattgagaagacaacaaatgataacatcccaattggtgtttgatagctactcatcggactcttaacaaaggtcgtcgtcccatgaatcggttctgccaaatgaaaacccgttttaaaccaaatcgccacactaatcactaagaatgcggcgaataaaaaggcaacggccatcccactgaatgacgcaaacttttgaatcttatcaatcccacgacttgataggaaagttaataataaaatccaaagaattcctaagacaccgaccacttgagtgccattcatccctaataaatgccaggttgctgtttgatctgaaccttggaggaacgttgaaaacggcacccacactttagcagctgttgacaccatccagacaatccatgacgctaaccagatgaacgtcccgatgaaagccgcctttttaccaatggatgcttctaaccaagaatagatgcccccgcgtgattctttcaaagaagaaccaaattcagcaaacattaatgaagttggtaagaaaaagaaaattgccgctaagatataccaaataatgctggcatagcccattaagtagaaagcaattgtggtattcgcaaagccgaagattgacccaaaaatcatcaatacgagaccttgaacgttaattttttttgatttcgccatttcaataagtcctttataattgtattaagtagaataaatatacaattcaaagggcataatgtcaattatatttgaataaatcaaccgtttccagcctttttattcatgtattcataattatatacaatttacgccacaaaaaaagacgttcacttttagcgaacgtcgattgccttatttaatgttggcaaccttagcgactttgccactattgacactcgcgctaatttccccttcttgaccgttattgataacaaattgatcggttgcttgacaccgtgggcaagttgtttcaatttgaaacttggtagagccatctgaattatcttctagtgctgtcttcgtcgtgatttccatcgctggatgttggcacttatagcattgaaagacaataaaacgccgttctacaaattcatctgctaaactcatgtgattcatcctttcaactagcttatttaagttcattctagcagtctgctattttttagggtacctttttgctcacgtgtcgttttctgaaagcatcccttagaaatgaatcaaaaggcgaacgattttaaagtttaaaagcattatggtatgtgatatacttacaacacaccatctagaaggagaggtttaaaagtttgccaatcacactaaaagcaagttatttttctgcaaattcaccaaattctagttcatttcacgaagattcactgatagaaatcagtgataatggtcaaatcacaaacattattcatcaaacggcgtcagaatactctgagcgattatcagctgcacgccaacatgaccacttaatcacactcgctcccggacacttcttgttaccaggctttatcgatctacacaatcatgcgccacaatggccacaagctggaattgcccttgatcgccctttagctgattggctcaatcattatacctttcctcttgaagcgcgctacgccgatttagatttcgccacacctgtgtatcaagacttagtgaccgaaatgctcgctaacggcacaacaaccgccctatatttcggaacaattcacaattctgcgaatctacgactcgcagaaatttgttcccaagcagggcaacgggctttcatcggaactgttgcgatggataatccagatcaaacaccagactattatcgtgatgcttctcctgaagaagccattaataaaacacaaacttttgttcaagcaattcaagatacctatcgtaatgggttcattcaacccgtcattaccccccgcttcatccctagttgcacaactgaaacacttcagcaactcggtcaacttgcacagtcccaacacatcaccgttcagacacactgcagcgaaagcgactgggaacacgattatgtacgcgaacgttacggccatacggactctgagatgttgcaatcattcggattattgaatcaacattcggtattagcacatgcaacacaactgacaactactgaccaaagtatcattaaaaccgaacaagcagcgattgcgcactgccctatctcaaatgcctattttggtaacgggattctccccgcacacgagttacttaatcaaggcattaaaattgggcttggcagtgatatcgccggtggttatacccctagcttatatgccaatttgcaacaagccgtaacggcctcccaaattcgacaagacggggttgacgccaccattgcggctgaccaacgcggtgttgcgaacagtcggatcagtgctaaacaagctttttatatggcaaccgtcggtggtgcaactagtcttggcattcaagctggtgccattgaatcgggattgcttgctgatttccaaatcgttcaagcgccaccacgctttgcaagtcttacaccagatgaacaactcgaacaacttttattccgccacaccaaacaccaaattaaggccgtctacgttcaaggtaaactggtccacgaaaaggagcacaactggtatgaatgaacaatctcaaaaattaatggtcggtcctgacgagccgatttcgaatcaagaagctggcttcttaggactacaacacgttttagcaatggatgtctacgttccccccgttatcattgccggtttattggcgatgggtcttgatgcaaaagccggcttaattcaagcgacattccttgctgccgggattggtacgattcttcaaaccaaattttttatgaaaatgcctgtttcccaaggcccttcatttgttccaattggggcaatcgccgggatttactttgctagtggtgctaaagacggcgggatggcaacggtgattggcgcttcaattgtcggttcaattctgttaattcttctcggcgtcaccggcctcttccaaaaaattattaacagcttagtcccccaagtcgtcggtggcacaatcatcaccatcgttggtctttcactgatgccatctgctttaggtgataacattttcaaagcacagggcaatatcaatgagaacttactcctggctgttgtgaccgtcgccattctaattctttgtgtttcgctaggtatctacttccctaaattacaaaaactcttcaaagttagttccatcatcatcgccttattaggcggaactgttttagcaaccatgcttggtaaatttgactggcaaagtgtgaacgaagcgagttggtttagcttgccaagtttcaccgcattccactatggtatgcacttttcgatgacagcaatcatgaccttcgtcattatctacgccgttttaatgaccgaaacgaccgggacttggtttgcaatgagtgccgttacggattcgcccatcagtaagaaacaatggaatcacgggattatcggtgaaggaattagctgtttaatcgctgcactcttaggcggctcaccagttacagggtatgcaactaacgccggcattatttcaatcaccggtgttgctagtaaaaaagtattcgtttctgccgggatttggtttatcatcttcggcttctttaataaattagcggccttcttatcagcgattccagccccagttattggtgggattttcgccatcatttgttcaactatcatgctcaacgggttaaatgttattcgcacactacacacccaagaacgtgatatgtacatcatcggaattccaatcattctatgtatcgccatcatcatcatgccacaatcattggtgaaagcaacgcctcaaatgatccaatacttacttgaatcaccaatttcgatttgtgcgcttgccgcaattattctcaacttaatcttaccaagagacagacaaattgcgtttaattagactgaaataaaaagaagccccctgataaaaaagtttatcagggggcttcttttttcgtaaatgtatttcccgattgagacagcacactttttttaaacgtgctccagcaggcatattcctgtgcttaaccaaacttgtcgcatcggcgattgcagacaaatccagttaatactcgaaatataaacgcctgcttgcgcactcttttagacactgaccattcgaatcgtcatgatgttcttattcatcgagatatcttccacaatttctgcatattgcatttcccggggaatttcgatgcgatagacgttagtgtaaatcgtatcacgttcgttttgcgttactgagaagttcacatcgcgaatttgaatctgatgttgttcaaaatagctctgaataaactccttggtttccaatttatgcttatacttaatttcgatttttttcaacgtattgatgtgaataatctttttcaagaagacaatcacgaaaatgacaaagaccgcactgatcaccgcaatttgatagtagcccatcccaattgcaagtcctaatcccgcagtagcccaaagtgaggccgccgtcgtcaatccttgaatcttgtggcgggtgacaataatcgttccagctcctaaaaaaccaatcccactgacaacttgtgcaatcagccgcgcttgatcagaacgaatagtggtactaatcgcactatgcgctaatgcaaattgaacgttttgcgctgcgatttcctgctgaatcatcgcaatcacacacgcaccaatgcagaccagaatgtgtgtccgcattccggctggacggttcttatattcccgatcagatccgataatcccagcaattaaggttgccagtagcagtcgaataatgatatgcacactcgttacttcaaacaataaaatccctccaaaataataccttatctctagtctagcataccgaacaaaaaaagcgctcgtcaatccatatcaatttacggattaacgagcacctattcattagccaactaggccgattgtttgtagaatcaaatagatatttaaaagcgtcaacacaattgtgacaaaccatgccgtatatttcacccaagggcggttaacgaatgggcccatgattttttcatcactcgtgaacattgtcaatggaatcatcgagactggcaatgcaacactcaagaagacttgtgagtaaatcaagaggttttcaacttgtgcttcgttcccatggtagtaaaccgtgaaaataataacaggtaagattgataacccacgggtaatcacccgtcgtgcccacaatggaatcttcatgcgaacgaaaccttccatgacgatttgtcctgaaagtgtccctgtgatggttgaattttgaccagaagctaataaagcaacggcaaagagtaaactcaacattgggctagcaatgctcccaacaatttctttgttttgtaaagcattgaataagtcaacgaatcgtcctaaatcactgttagttccaaagaacattgctgcccctaaaactaagagtaaacagttaacgataaatgcgactgataattgaatgtttgaatcaatgactgtaaacttgattgctttcttcttttcggcgtaatcgtcacggtcatattgacgtgcttgtgcgattgacgaatgcaagtagagattatgcggcataacagttgccccgacaatccctaatgccaagaatagcatcttctggttggtaacaatccgtgtacttggtacaaatccgcgcattacgtcgcccatatttggttgcgctagaatcacttcgtataagaaaacgaataaaataacggccaccaaggttgcgacaatcgcttcgatcttccggaaaccaagtttcattaatagtaataatagcaagacgtcaaatgcggtaattaagacaccccagagcaatgggatgttgaaaatcagttctaacgcaattgcggaaccaataatttcggcgatgtcggtcgccataattgctaattcggtgacaatccagaggaaaatccccatctttttaccggttttggcccgcgtcatctgcgctaaatccattccggtcacaattcctaaacgcgctgccattgcttgtaataacatcgcaattaagtttgatactaggatcacactgatcaaggtgtatgcgtattgcgcaccaccggcgattgacgtgatccagttccctggatccatataaccaacggccactaacgcaccaggtcccataaaggccatcaacgtccgccaaaaaccagcgttcttgggaatcgcaaccgtgttattaatttcttcaagactcgtgccatcagcatagtgtatgaatttctcatgcttttgttgattaagttcacccttttgtgaatcttctcgctgcttcttatccatataagtacctctttctcttcgattgagtcgttcaactattaggattcaatgactttgattttaggatgacctaactctgatcgtctccagtgttcaaattaatccttacccattctatcatatctctttgatgttgtccctgaacaagattaaaaaaaagctgtttctcagcgtttttttaagtaaccgattacaaataattgcccaccttaagtgctattaaaaatgacgttgactgtctttaacagccaacgtcatttaacttttatttagacgactaaacttaatagtaaaacgccaattaacccaacaatcgaaatcaatgtttccaaaactgtccaagttgcaagggtttctttgacacttaaatcaaagtattccttgaacatccagaacccggcatcattcacgtgggaagccgctaaactgccggctccaattgaaaggaccatcagtgcagggttcacaccggctgattgcattagtggtaagaccaagcctgccgccgtcaatgacgcaacagttgctgaacccaatgccacccgtaagacaactgcgattaaccaacctaataatagtggtgataaattggcatttgcgaataatttagtgacactatcgccaaccccaccgtcgatgaggatttgtttaaacgcaccacccccaccaatgactaggagtgacatcgcgattgatttaacggcttcttcaatcgtcttcataatcgctagggttttaatccgacgcgcccaacccatcgtatacatcgcaaccatcaatgaaatggtcattgcaatggctggtgtcccgataaaaccgacgattgaatccagcatcgttggatttttaggtaatttcccgccgttaaaggccatttgataaatcgtggtgacagccatcaaaatgactgggaataatgaggttatgacactaattccaaaccccggtgtttcgtctaatttaaaggttttctgaggcccaagtgccgtcagattaccttggcgcgcgaacgcatctggtactaagcgttttgcaatcttagtgaataatggaccggcaataatcactgaagggatcgcaattaagaccccatataacaatacgtgaccagcatttgcccctaaagctgaggtaattgctgttggtgctggatggggtggcaagaacccatgtgtgacagaaagtgctgcagccatcggaattccaaggtacaaaattgacacacttacttcgattgcaatcgcgaaaacgattggtactaacaagaccatcccaacttcaaagaataaggcaatcccaatgatgaacgaagccaacataattgcaatttgaagtcttttttaccgaacatatcgattaaggtatgcgcgattctaaacgcgccaccagcgtcggcaactaaccgccccatcatggcaccaaagccaaagacaattgagagctcaccaagttgaccgccaatcccgttttgaacactggttgcaatgtccgttaatggcatacctaggccaaccccaacggccattgccgttataactaaagcgataaacgtattgatcttaaatcgaataataagggcgagtaataagataatgcccaataataggactactaatgccataattttccctattttcaataatgtttgcgctatcatgatattgttaaaagtaactgggctttcagacccagttcacttcgttactctttaacttgcatatgtttgcgttggaagtcagcaattgcgccgtattccgtatttaattcccgtgttaatcgaatccagattggtaatagttcgcgataaacttcaaagttggcttcttctggatgatgcacattcgtcacaccaaccatttctttgacagctgatagatcatccactaagcctaaactatacatccctaagacagcagcacctaaacatgagctttcgaaactctctggaatcgtgacgtcttgttcaaagacatccgccaacatttggcgccataattctgaacgggagaagccacccgttgcctgaatactctttggtttacctgccacaccttcaatcatcagcatcaccatgtataagttataaacgatgccttcaagcgctgcacgcaccatgtgcgcccgcgtatgttgccgcgtcaaaccgaagtatgatccacgtgcatctgcatcccagattggtgcccgttcgccacccaagtaaggatggaataagagtccatctgaacaagccggaatttctgccgcaatttgtgtcaaaatatcgtatgttgaaacatgcatttgttcagccttgattttttcaggtgcaaaaagttgatcgcgcacccaacggaagacaattcccccgttattgactggtccaccgaccacccatttatccttggttaaggcgtaacagaataatttaccgtttggatcaaccactggatgatcaacaaccactcgcacggcaccgcttgtcccgatagtaacggcgactacgcctggatcaattgcatttaccccaaggtttgataaaaccccatcgctggcgccaaagataaatggtacttcagcaccaatgccggttaattcaccatagatcggatcaatccctttaacataatccgttggttcgactaattcaggtagttgttggcgtgtgacaccagccacttcaagggcttgttgatcccaatctaaattaaaaatgttgaacaagccggttgctgaagcgattgaataatccatttgatacgtatggaaaagtttttggaagacatacgttttaatatcgatgaattgactagcttggttgaacaattcaggttgcgcttctttcagccaaatcagttttgaaagtggcgccatcggatggattggtgtgccagtgtgttgataaatggcttggcccaacccattttctttcaattgttgacttgctttagcagctctattatccgcccaagtaattgcccgagttagcggttgatcatttgcatccatcagaatcaagctgtgcatcgcagccgagaaactaacgccctgtaattcgccggcttgaacgttgcccttgcgcatcacctgtcgtaatacttctgacactgcattaaaaatttcatccggatcttcttctgccatatcgggtacggtttgatataaaggataaccaacgtttgcgtaagctttaacattcccttttaaatcatataaaaccgctttcgtacttgttgttccaatatccgcaccaatcatatatttcatcataattacctcgtttatgtggtgtttactgactacttactaggataccacttatttcttatcaactacatggccgccgaattcatttcgtaaagcagcaacaactttaccagtgaatgtatcatcttcaagtgaacgataccgcatcatcaatgataaaccaatgaccggtgttgggacttgtaatttcaaggcttcatctaatgtccattttccttcaccagatgagtgcatgataccttttaacccttctaagttagggtcttttgcaaaagcagattccgctaattccatcaaccaaccgcgaatcacagaaccattactccaaaccttagcaaccgcttcgttatcatattcaaactcaccatgtgataacacatcgaatccttcagcgatagattgcatcatgccgtattcaattccattatgcaccattttgagataatggccactaccagccttcccggtatagagatagccatctttttgagcaatatctttaaaaatcggttcaatctgtttgaagacttccgcgctgtcaccgccgatcatgaagtttccgtctgcgttagcaccgctcatcccaccagaagttccgacatcgaagaaatgaatcccttttgtggcaagcaatgcattgtgttgtttagaatcttcgaaaaatgaattaccaccatcaatgacaatgtcaccggctgtcaatttggtacttaacgtttcgattgtggcttgtgttggcttaccagcaggtaacatgctccacacaattttaggttgtggcaattgtgccaccacatcatcaatatcctttgcaggtaatgcacctaagcgggttgcttcttgaaccgctgcttcatttaagtcaaaggcgacaacctcgtgcccattacgtcgtaagttagcgaccaagttaatccccattttgcctaaaccaatcattgctaatttcatctttgctagtccccttatccacaatttcatgtcacttttattaatgtcttcattatatgtaaattattttctttaatcaaccctttttgagaaaataattttcttagttgctttttatgctatactatcgataacaagggggcacttcaatgacacaaaacatcgattccttactccgtgcgtactacacgaatttaagtgaaaaatacaaacaaatcgcagattacatcttaaaaactgaacatttcaatcaaagtttaacgattcaagaatttgcggctgactgtggtgtttcaacggccactatttcccgtttcgccaaaatgttgaccttcgcaaacttccaggcactcaaaatggcgttacttgctaaacaagcaatcccaacagataatccactcttccatgaaattagtaataatgatgactatctgaccatggccgataaaattttcgcatccaatactaatgcgctcaaagcaactcgttcactactgactgaagcgcaattacggcaagccgttgattatatcaaccaggccaagcgcttaagtttatttggcttgggcgcttctggaatcgtcgctcaagatggctaccacaaatttttacgaactgcgattccaactgtttacagccaagactaccatctacaattgatgcaggccacccaactcaccgaacaagactgtgcgctgattatttcacatagtggtcaaaataaagatgctttagaaattgcacgcatcttaaaagaacgtcacgttccactgattgtcatcaccagttttggcaattcaaccctcgctaaattgggtgatgtgacactgttgtccatttccgaagaaaccaattaccgcgccgaagcactacacgcgttaattgcacaaatcagcatcgtcgatagtctgtttatgatggtcgccgttaataatggcccacaaacagaacaaagtttcaaagccattcggactgaaattgatcggactagacaaaaataaaaaagctgaggttgaagaaatacttcaacctcagcttttttgctgttctattttgaacatctaaacgtgcttttttaaacagcttcctgcgcttaaccaaatttgccaaatcgccgattgcatcggcaattcgtcaaatcctgttaatgctcagaagctacccgtttcaaacgtactttatttaatttctgctaatgtcttttcaaggtgggctaggacacggtctttacctaacaattcgattgaatcaggtaatgatggaccatgcatttcgcgagtcgttgcaatccgaattggcatgtacaattgacggcctttaatcttcgtatctttttggatgcctttaatgatttgcataatccgtggtgctgtgaataatgttaaatctttcaagcgttcgctgaattccttcaaaacaacggatgctgtttcgttatttaattcttcaagcgcttcggcgtctaattgttcaggttcttcaaagaagacatctgacatttcaacgatttgagctgtgtagctcatttgatcttggtataacgcaatcaaatgacgggcccattcgatcattttgctatcaggattttcagcgattttacccgctttaatcaagctttctaacgaaagatccatgattttgtttggatctgattgtttaacgtattggttattcacccattcgagtttcttttgatcgaaactagctggtgatttgctcaaacgttttggatcaaattgtttgatgaattcttggcgattgaacaattcgctttcgccaactggtgaccaacctaatagggcgataaagttaaacatcgcttctggtaagtaacccaattcgcggtattgttcgataaattgaagcactgattcatcacgtttacttaacttcttacctgtttcagtattgatgatcaatgtcatgtggccaaagactggtggttcccaaccaaaggcttcgtagacagccaattgttttggcgtgttggcgatatgatcgtccccacgcaagacatgggtgatttccatcaagtgatcatcaacgacaacggcaaagttatatgttggcatcccatcgcgtttcatgatgacaaagtcgccacctaaacgatctgattcaaagctgatttcacctttaacaatgtcatcaaacttgtaaacgtgatccttaggaagacgtaaacgaacaactggttgtaagccttttgctttagcagcttcttggctagccttaatttcatcatcactcataccttcgtattcgtagatgtaacgtggtgcttcgccagctgctttttgggcttcccgttcttcagttaattcatcttctgttttgtatgattcgtaagctaatcccttagccactaactcttcaattaaaggcgtgtaaatttcgcgacgttctgattgacgataaggaccaaagtcaccaggcttatctggaccttcatcccaatccatacctagccacttcaaattatctaactgactgttttcaccgtcagcaatgtttcttttcgtgtcagtatcttcaatccgaatcacgaaagtccctttgttgtgacgtgcaaataaatagttaaacaatgctgtacgagcattcccgatgtgcaaatgacctgttggacttggcgcataccgcactcggattttattttttgccataaaaaaaacgcctctttctaaaattatacttgtctactagtttaccgttattatgcctaaaaataaaggctcagagaccactaatccacaaaaaaagaatctaggacaaaagtatgtttgtcccagacccttcttctgatagtagaattctatcatttaaacgtgctttttgaaccatcttcctgcgcttaaccaaatttgccaaatcgacgattacatcgtcaattcgtcaaatccagttaatgctcagaagataaccagttcaaacgcactcttccacttaaacgtgcttacactaactgcctcctgcgccttgctacatcagtcacatcaccggctttaccggcaatccgcctgattaggcaaatgcttaaaagcaaaccgttagtgacgcactctcaccgcattaacggagtggtgtccattgccattcttcaacttctggtaaatcagtaccttcattgcgaatgtattgattgtgtttagcaaccatgtcatccattgattgtgcgaattgaccagcttgatcaccaagtacgtcacctgcaacttctttagatagactgaaacgatccatttgattcaagacacgcatgtcgaatggtgttgtaatatcaccattttcacggtagccatgaacatgaaggttatggttgtgacggtcaaagaagatatcacgtactaagccttcgaaaccatggaatgcgaagaccactggtttgtcttttgtaaagtacatgtcgaattcttcatctgttaaaccacgagggtccactttaggtgaacgaagtttcaataaatcaacaacgttaatgaaacgaatcttcatgtcaggatattgtttgtgcaagattgagattgcagccaaactttcaagtgttggttctgtcccagcagctgcaatcacaacatctggttcagcatcttggtctgtacttgcccagtcaataatcttcaaaccattcttaactaagactgttgcttcgtcaattgagaaccattgttgacgtgggtgttttgaagcaaccactaaattgatcttttcttggctcttgaagacagtatccattgttgctaacaacgtgttagcatcagcaggtaagtattcacgaatgaattcaggtttcttttcagctaagtgtgttaagatacctggatcttgatgtgtgtaaccattgtgatcttgttggaaaacagttgatgtggcaatcacgttcaatgaaggatacttgttacgccatgcttgttcatcagccttacgtaaccacttgaagtgttgtgttaacattgaatccacaacgcgcaagaatgattcgtaacttgcaaagaaaccatgacgaccagttaggacataaccttctaaccaaccttcagcttgatgttctgataattgtgaatcaagaacacggccttctgttgccatgtattgatcgtttggttctttgattgattccatccattgacggtttgttgcttcaaaaatatggttcaaacggtttgacattgtttcatcagggccgaagattctgaagtttttattttgatcgttgtctttgatgatatcacgaacatattcgcctaaaacaatcatgtcttgcgcaacgactttaccgtgttctgaattatccacagcataatcacggtaatctggtaagcgtaatggtttaggatcaatcccaccattggtgattgggttagcagccatccgttgatcgcctttaggtgcaatttctgcgatttcaggttttaattgacctgcttctgtaaacaattcttctggacggtatgatttcatccaatctactaatgcatcaacatgttgcatgtcagcactgtcaattggcactggaatttggtgcgcacggaatgaattttcgattggtacgccatcccatgtcttaggaccagtccaacccttaggtgcgcggaagacgatcattggccatactggacgagatgaatcgccgttttcacgcgcattcttttgaattgcttggattttttcgatggcttcatccattgcagcagcagttgctgggtgcatcttttcagggtcgtcgccttcaacaaagattggttcccaaccattgccttcgaagtatttcgttaattcttcatcactcttgcgtgaaagaattgttgggttagaaatcttgaaaccgtttaagttcaagattggtaagacagcaccatcattcttaggattgatgaatgtgcttgataaccatgatgcagctaatgggccagtttcagcttccccatcacccacaacaacagcagcaatcacgtctgggttatctaaaatcgcaccaacaccgtgtgataatgaataaccaagttcgccaccttcatggattgaaccaggtgtttcaggagccgcatgagaagcaacgccgcctgggaatgagaattgtttgaataatttcttcatcccttcaacatcttgagaaatttctggatagatttctgaatagctaccatctaaatatgagtttgagaccatcacttgaccaccgtgacctgggccttcaacgtagaacatgtttaagttatatttattaattgcgcggtttaaatgagcatataggaagttttggcctgagattgtcccccagtgaccaattggttttgccttaacatcttttgcttccaaaggacgtttcaatagtgggttatcttttaagtataattgaccaactgagatataatttgcagcccgccaaaatgcgtcaactttagcaaggtattctttgcttgaataatctgtcattttaatagcacccctttttaattttaaaaaagttcctaatagctttactttaagttccagtcgcagcttttgcaactttgttgtttctgactactctcttatcatactaaactttttaaaaaagtcaaccatttttaatattggggcgtaccaattttttaaatctaaaaatagcggccctattcgcgaccgctaaccgtaacgaatgtattatatttcatgtattggtagtgcaggcgcatcgttgaaaattcaaacggtgtcccatcgtctaagaagaaaatcccttccatgatgccaactggttccgtcggtttcaactttaagtgcgcttgatcatcatcagttgatggttccgcgaaaattgacaggaaagcgcgtgtgacttcttgatttttctcggtttccaagtagttaaagattgaactcgacacaattttttcggtcaattcgggcattaccttaatcggaatgaagcccgtttcaatcatgaatggttcatcatcaaacaaccggagacgcttgatttcgtaaacaaaatcatctggtttcaggaacaagtctcgttgcaattccgcgctcggcttgatgacttggaaatctaataatttaatccccggtgtccgattaccggctttaaaactgtcggtaacccctaggttagagccattgtaattaaaaaacgagccaccctttaaataaagtggattaataaaggttcctgaaccccgttttttgaaaatgatcccttgattagccataatgtttaacgcacgtttgaccgagctacgactcacttgatagtgttcagtcaacgtccgttcatcgggtaatttcatgctgggaaatgattctgcgttaatcgccttttttaagtccgcgataatattctgataaactaagtcggccatgctaaactcctttataaatcattttatctcaagcttattatacatgattcctaaaagtcgtctacaaacagactcgataaatgttcaattattaatgcaggccaataaaaaaagaggtgctgagacaatgtttattgcctcagcacctcgcgcgctccagatcagactatcttgcaaaaaatgcctcacagcgcctactttttatttaatgtgcttgaaattgggtatagtattctgctagtaattgggcaatccggttcccagtaatggcataattttcagcgggttggttagctaatgaaatccgcaagtagccatcatcagtccccattcctgccccatccatcacaacaacgccgtatttagctgcaagtttatcttcgaaatcaagatagctcacgtgcttttcgaaatagtcgtggaattcatgcccatactttctttcagcaaaatcatagatgttaaataccgcataatattcagcgttttctttagagtgatcacattccatgcccatcgattcccaaaaagcgttgtatcgcgcatcaaccattttcttggaagcttcgatgtatggatccttttcaccttcgtgaattaagctggtcaaactaaatagtgccatcaaaatttgttgtggtgttgataatcccgcggtgtggtacaacgcgatttcacgactgtcagccactgttcgatcaatgaatttcatcgcaagcggattaggcgccacaactgagtaccgtttttcaaaagctgccttaattgctggttcttcagccgttcgcttagcaataatttcatcaaaaacattatcttggtgcactgctagtaagcctaaacgatgcccagttgccccataaagttttgaatacgaataaactaacatcgtatttcggggggcaattgagtaaattgtttggaaatcattcacaaaagtcccataaacatcatccgtaatgatgataatttctgggtttgcttcaacgacctctttaatcttagctaacgcgtgtttgctgaaagcccgcgaagtggggttcgttggattaaccacaaaaaaggctttgattgtcgggtccttcaattcttcaaacttggcgtccatcatttgccagttgtcatcttcaacggaactcacatcgaattgctttaatttatattcacttaattctgggatttgcaaataaggggtaaagattggggtattgatggcaatcgtgtcgccaggccgtaagatatggctgatcttcaattccttgaacaaataaaccattgcggctgttccgccctctgttgggaagacatccgtttgattagctaatttttcaccattatatagtgacacttcaaggtatttatttaggattttttccacattgattaaacttctcgaaggtactggatagtgattgccaatcgcaccgtcgacaaattcgtgaaccaaatcatcctgattgaggcccatgtgcttttcggtataatctaaaaaggctaatataaatcgatctgttttatgactggcatcaaggtaggcatgcagccgttgtgcaatccctgctttatcaacgtagcccgccatatctccatcagcctcgttaattttcttagcagattcttcgacgccaaattcgacaagcttattaaaagctaatcgcgcccgcgtattaatccagttagggtccccacgaccaacattaattggcgcattatgcattgtatttttttctgaattttctaagaacaaagcggcaacttcaaagtttgacatctcttttaatcgctcaatatctaatgagtgcatcgtttttccacctttttcaattacttgctacattcataatcgcatctaaaagcactttaacgctaattgacagtcaaaataacggctagcattgtaaatttattgtttgatttattatatcgtttttgtctcaaaaataaagcactcattcaaaaatcaaaccataaatgccacagcgattctccaacttcatattgcatcatttaccacaaacctgcaaccctgcggcgggattttttctaatgctgctaaaaaagcacatcatcgttcaacgatgatgtgctttttaaagttttaagcgacgttattccttattttctttgaagaacttcgcgaaatttttgcggtaattgtgcaacatccatttaatcaatagccagcgtttgagattcatatctttgctatattcaaaagtggtgccgtaacgtttttgtttgatgagtgccaatgccttgtctttttcggcattattgcgggcatatttcttaaagacatccactgaaacgcccaaccaaagtgcgggactgtcttcatctttattcgcccaaacaacaggttcatcttgcaagtcgtttgtcacgtaatcgcgcaccacccactgggctaagttatagccgttcaaggtaacaaagaaactactgcggcccatccgtaaattgatgtcgaataacttgtaggtgttatcgcgttcatcatatttcatatcgaggttggcataacccgtaaactcgatatcttcaaggaatttttggacttgttgataaatttgtgcgttgtattccggcaaaatcgccacgtaattcccaatagctgcgggtgctggatcttccaataatggatggcccagacacatcatcttcacgtgatgttgttggtcaacatagatgttcatcacgtgcatccgactgtcatccccaggaatgaagtcttgtaaaatcatgtctgattggtagccattttcatatacttttcgcatgatgtcttggaattcagcttcacttttaatcgtgaaagcttttttgcgcccttcaaaatgcacatcaagccattccacagaatccgccggttttaacgccactggatattggaaaggttgttccacctgattatcttcaaccatttgcttggtaatgatgtgcgtcttgggataaggtaagtcatatttgtcacagatttcatagaaggtttccttataagtcaacttttctagtaaatcgtgatcaatatatggacaaacaaagacatcttccaattccgctttatgttgtgaaattaagctcgcatagccatcaccacagccaatcaaaatgactgggccatcgctatcgcgatagatttcctttaattttagcatttcagtaatgaatccaggatcttcactgaagcctggaatcaattctaaatcgacgatttttgtaaaccgagttggtgctaattcctgacttgcgtaggccttaacaggttcatgatacatctcataaaacgaacgggccatcccgtaaacgttaaaatcgctccccaataaaatgggggtgaagtttttaccgtttgcttgcatgctgtcaccttctatatcaatatttatcgtagtataccagactgccgttcaatatacgtcagctcaggatgctctttgttaaaacttaattagtaattgctacttgttgtatagcccgtcgacaatattttggccgaccactgtcatcggatcaatcactttgtcgggatacaatggaaattccgactgtgcaacactcaattcggtacagcccaaaataaccgcgtcacaatcatagtcatttaacattgtatcgacaattttttgatacttgtcatggctgaatgtcccagtcgccttaatgtcatcataaatcaaactcatcgtggcatcttgcaatgtttggtcgggaacaacactttcaagaccaaaagcagcaattgctttttgataaataccggcttgtcgggttccggttgtgctgagaacaccgattttcttcaagccgggaattgtttgttgcatgtgtttgaccgtttcccgtggcatgtggataatgtcgaaatctgcggcagcttgtaattcgtcgtagaagtaatgggctgtgttacaggtcattaccatgaacttcggcgctaacaaattcatttggcgaatatcttttaacatcacgggcaacggattttcttggctgttgtcgaggatgtaggctgtgcgatctggaatttcagcgtggttgaacacgacgtaattcagataatcttgatccttcttagccggtgttaattcatcgattagatgtacgaaagtttcggttgccgccgtccccatgccgcctaaaatcgtaaacatttcttccatggcaattctcctttacttaattgacttcatttgatgctggttagtccttcttttgaggactcacttcgatacctaattcttctaattgttccggtgtcacttcactaggcgcattggtcattggttctgtggcccgggaatttttagggaaggcaatcacgtcacgaatattgtcgcgactagcgagcaacattgcgaaacgatccaaaccaatcgctaagccgcctgatggtgggaaaccgaatttcatggcatttaataagtggccgaaacgttcttgagccacttcaggggcaacccctaaaacagataacattttttcttggacttctggatcaaaaatacggagtgaaccgccacctaattcataaccattcaagatgatatcgtatgaaattgcatgtgccttatgtggatcagtatccaacaatggaatatcttcatcacgtggacgcgtgaatggatggtgggctgcaatccatttgccaaagccttcatcatattcaaataatggccaatcaacaacccatgtaaatgcaaattggctcttatcaatcatatccatttctttagcgaagtgtgttcgtaagtaacctaagctatcacaaaccacttggaagttaccggcaacgattaaaattaaatcatcatccattaagttcaaacgttcaacaagcgcttcttggtaaggtaataagcctttagcagaagcccctgataatttatcaccagcgtatttcgcccacaacaatgacttagcgccgtaacgttcaatgtattgttgttgttcgtctaacgctttccgtgaatatttaggggcggcattattaacgacgattgcgcgcacatattggcctgcttcaacagcttcagagaatggcttgaagtcagaatcttgcacgatttctgtaatatcttgaatttgcatatcaaaacgaacatccggtttatctgaaccatacttgtccattgcatcttgccatttcaaacgtgggaatggtgtttgcacatcgatgcccttgacgtctttcataacttttttcaataaaccttctgtttcggtttgaatttcaacgtctgataagaacgttgtttcaacatcgatttgtgtaaattctggttggcgatccccacgtaaatcttcgtctctaaaacaacgggcaatttgatagtacttatcaaagccggctgacatcaataattgtttgaagagttgtggtgattgcggtaatgcgtagaaactacctggataaacccgtgaaggcaccaaataatcgcgtgcgccttcaggtgttgaactcgtcaagttcggtgtttcgatatttaaataaccattgttatcataatagctgtgaactgcacgagtaatcgcagcccgtgttttaatggcattttgcatttctggtcttctaagatccaaataacgatacttcaatttcaaatcttcagaagccgtattgttatctgaaatttcaaatgggagggtttcagctttgttcaagaccactaagtctttaacaatcacttcgattttccccgtcttcatgtctggattaatggccgcttcatcacgcgccatcactgttccttggacttcaacgacatattcactctttaatttacttgctacttggaaaatatctgcatctgtgtcttgattaaacaccaattgaacgatgccttcgcgatctcttaaatcaacgaaaattaagttcccaaaattccgttggctttgaacccaaccatgtaatacgacttcttggttgagaaattcttccccaactaatccacaatatgttgttcttgttctcatatttgccaatcctctctgaatctacattttataaaaaataaaaaaagcaccctcgtctttcgacaagggtgctttgcgcacggtaccacctttaatttcagctgttgataacgctatctgctagcgggatattcatccaagcctcaaaagctgtcaactggaatcaataagtaactttcaacggggttactctctctgtgattgatcgctaaaaccaagtactttatcgatggctacattttattataatgtccaaaatatatcacaaagccctttaaccgtcaagttttgcagttggattgagctagctggattcgaaccagcgcatgacaggatcaaaacctgttgccttaccccttggccatagcccaataatgcggcaccaagattaagttggcgccgtaaattgattgaattgaaacgtgctttcattaactgctttctgcgttttgctacgtattgcaaacaatcagctgtgctgattattcacaacactaggcaagtgttcaaaagcaacccgttaatgacacactctaaacgtgcttttgatgacaacaatttccgcttaatctaaaattcccaataatcctaaaaacccggattattgggaattttgtattaatgctcagttgttaaccgtcatcaaacgcactctaaacgtgctttggcagccatcttcttccggttagctacatcagtcaaatcaccgactttgtcggtaatccgcctgattaggctaatcctcagaagataaccgactgcctgcgcactctttaaattaccatacaaatagtccgactgttgctgctgaaagaagtgatactaagattcctgatagcaacatgtagccgacgtttttggcaatcatgtcgttcttttcacggtccacaaggcctttgaaggcgccgatgatcatgccgactgttgagaagttggcaaatgatgtcacgaagaccgttaagacagcttggtaatgtggtgcgaagctcccgattgaatgttggactttacccatgacaacgaattcgttggtcaccaacttcgtccccatgaattgtgcaaattcaaaagcgtggtgcacatcaagtcccattaaccatgcgaatgggaacatcacgattccaagtaaatgttcaagggtaatccaagggttcactaattgaagcaccttgtcgatcaaggcagccaacgcaacaaaggcgatgacgtttgccgtgataattaaaactaatttaccagcatttaagattgaatcacctaagaatgagaagaatggttcacgttccactttgccttcaaccatttcggttgcttcaacagctgcggaaccactcccacccattttagcaatcgtatcttcttcgggtgtgactttcactgggtttaaaatattggtgacaataatagcgttaataatgttgaccggaatcgccgttaaaataaattggcccggcatcatttgtgtatatgcgccgatgatggaagctgtcacacagctcattgacatcatcgcaagtgttaatgttcgttctgctttcatttgtttcaattgtaagcttgaaacagctaatgcttcggtattgcctaaaaacatcatttcaactgcaaagaatgattcaaactttggttgtcccgtaatcttagctaacccacggcctaaccatttaatcacccaaggcaagaccccgatatacgttaagatatcgaataatgggataatcatcaagattggtaataacacgctagcaacgaaatccatttgtttcacattgacccaacttggtagtgcaaaagcaatcccagtataggcaacttgcactaaccagttaaagccgtttgctgcacctaaaacaatatcccgcccgattgaaaaactcgttaaaaaccaagcaagcactaagttaatcactaacatgattaagacggagcgccaatcgatttctttctttttctttgagaacagaaagccgactccaataaaaatcagtaatccaacaacatttacaagcaaatacacgacacgccacatccttcatttgtctttttcgtaccgctttaaataataccgttcccccttgtaaatgtaaactattgttcaccccctaattgcataaataatcacttgttaaacgcaactaaattagtccacaaaaaaagcggtccccttttgcaaaggaccgcttttccattcatttttaatagcccgcattccactgatttgtagactgttgcgtttgccaagtattggtcgtgttactgtaatcgttgttaccactataagttgcactgttcgagtagccatagttactttgcgtcgtcgttgcagcactcttttcaccattcatgacactttcagaataaaccgtaaactcttgatgattttcttcacctgtaaagttggtattcaaatcgttttgtttggtttctgcgttgttaatcgttgttttctctaatcccagtgacgttctcaagacatctgaaacgcgttggatttcttcattggttggaatctgatacgaactaccatcaatatcagcattacgtccaattaaaacatcagactcaattgatttagctgcctttcgataatttgcttgaatcgctaccatgtcatcaaaactgaggttagtggcaacactatctgacaaggagtctaagatagattcaaagttggtcaaagatttaagcgagactgcagaattaatcatagacgtgataacttgtttttgccgtttttgacggccataatcgccttctggatcatcgtaacgcattcgtgagtagtctaaagcggcttttcctttcagatgcatcttgcccttagtaaactcgctcccgttccattcgaacgtaaagggtacgtcaacatcaacgccaccgacagcgtcaacaatcttcgataagccccccatgttaaccgtgacatagtaatcaattgggacatcgaacatcttttcaaccgtcgacatcgccatatcagaaccaccaacattataggcagcattaatcttctgcatgttaaattcatctgcgccttgtaactgcactagcgtatcccgaggaatgctgaccaacttgacctgctctttatctgggttgaccgtcgccacaatcattgtatcggaattccctttatcaacccggccctcagcaccagtatccactccgagtaataaaatagagaatggttttttatgtttaatcgttttagcggcttttttagtcgtatttggtttataaattttattcgttgcagacttcacttgattactgatgcgtaatgcatacgcgccgccaccgaagaggactagcgttagaatgagtatcaaaactttcatcgtgcgatgctttttaacttttttgtagtttgcttctcgagatccgaaaaatttagaattctgcataggtgtttcccttctatcatgtatcataccggcattaataatgttatgttgctattatagcggaattatcatttcaaacaacgccttttaagaaaagttacacaattttaataattccttcaattgttgaacaacactttcctaagcgcttttatgctaaaatataaacaattagtcttaattatggaggtttcatatgtcaactcaacaactccccacccgcaatgctgttccagaaaagctcacatgggacttaaccacgattttcaaaaatgatgcagcttttgaagtagcctttaagaaagttaaaacgcaattacccacactcaaaacacttgatcgtccgtttgaatcggctgatcaattagtcgctacaatcaaacaaatcttagccactttccgccaactcgaaacaatttacgtttatgctagcatgaaaaatgatcaggatactgctaacgcaacttatcaaggctatcaagcccaagtggacagcttagcggccgaagtttcagccgccgctgctttcttagaccctgcgattctcgcaattcctattgttcaattgaccacttggttgtcagaatcccctgctttagccaaatacagccatttcattcaaaccattaccgatagtcgagaccatgtcttatctgggcaagaagaagccttgttagctgctgccggtgatatcttcagtgctgctagtcaaaccttcagcgtcttagacaactcggatttacaattcccagaagtgactgacgaaaacggacaaacgtttcagctttcagacggggtctacagccaacttttgcaatcagccaaccgatcagtccgccaagcagccttcgaagcactttacaaaacttatggtcaattcaaaaatacatttgcgacgacgcttgccactgaaatcaaaggtcataattacttagctcaagtccatcactacgatagtgcacgccaagcagcgctagcacccaaagcaattccagaagccgtctatacaaccttggttgatcaagtgaaccaacacttaccacttttacatcgctatactgaattacgcaaaaagcaacttaatttatctgaattacacatgtttgatctctacacaccacttttaggaaaacccgcattaacctacacttatgagcaggcgcaagcaactgccaaagaagcattgtcgatcctaggacccgattacgccaaacaagttgcccatatttttgatgaccgcttaatcgatgtttgtgaaaaccaagggaaacggagtggcgcctattctggcggcgcttatgacaccaaccccttcattttattaaactggcaagatgatttaaacaacttatacacattggtccatgaaacggggcatagtgtccacagcgccttcacccgtcagacccaagattatgtttatggcgactatccaattttcgtggccgaaattgcgtcaacaaccaatgaaaatctcttaacggaatatttattgcaaacacagtctgatcctaagatccaggcctatctactaaactactatttggatggttttaaaggcactgttttccgtcaaacgcaattcgctgagttcgaacatgcgatgcatgctgccgctgccaatggtcagccactaactgccgagttcatgtcacaacaatatgcggacattaatagccgctactacggacctgacgtcgttaacgatccacagattgcccttgaatggactcggattccacatttctacatgaactattatgtttaccaatacgcaaccggctttgctgctgcaacgactctcgctaacggtattagcaccaaacagcccggtgctctcgatcactatttagactacctaaaagctgggagctccgcctacccaattgaaattatgcaacaagccggcgtcgatatgacgagtgccgactatctcgaacgcgcttttgcagttttcgaagaacgtctggatcaactcgaagccctacttgctaacctaaattaagcctcatgaaaaaacgtcctcaatgattgaggacgtttttttaacggctaattcgtcgatgatataacaatgcaataaagtaaaagccaaactcaatcgtggcgatgaagaaggtcactggccagttcgttagataaccaagccataaaccgagccaaacccctaataacgctgcggcaaccgagattgccaacatcccgggtacgctcttcgctaaatatttagcaatgaacgccggaatcgtaactaagatgaatactagtaatgaccccacaatctgagcagcaatgctgacactgacggctaataaaattaagaaataaatcgatagtaagttggtctttaaaccttgtgcttgagcgccaatcggatcatatgaatcaaataccaagtaccggtaaaagatcaacagcccaatcataattgccccagataagatgattaattgataaacatctgctaagctaatgccaataatcgaaccaaataaaatattggtagcataactagcatttcggtttgaaagggataaaaagagaatcccaaaaccgacaaacagacttgaaatcgcactaatcgacgcttctcgccgtgattctttggcactcatctgaccaatcgtgattgaactgagtaacgtgaacaataacatcccattcaatggtgcaattcccatgaaaaccccaaatgaggctccggcaaatccaatttcagatagggtatgcgctagaaatgacatgttccgcgcaacaacaaataccccgattaaaccgcaggtaattgcgataaaagtactggcgacaaaggcatgccgcataaaatcaaaagttaacactcgcttatcctccgctttaatctaattccaaattgggatccaactgactcattggtccggcttcatattgacctcgttttaaaaataggtattgatccgtgtatttccgggctaattctaaatcgtgggtcacaaaaataaccgtcaaaccatgttcccggttcaactctgcaaccaaggccatcacttcttctttagtttcaatatccaaactcgctgtcgattcgtctaaaatcaataagtctggtttactgattaatgcttgggccaaatacgccttttgcttttcaccaccagaagcattccccacggtcgtcttttgcaacgcggttagatgggtctgttctaaaatttgatcaagcgcttggcgttctttgcgcgatttccacggtaagtggctatcaagttgattcaaactcacaaaactacgaatggacaacggatattcagcttctaaatttctaaactgtggcacataaccgatgtttagcttttgcttatccgggttaaaaacgagttgtccttctgtcggttgtaaattaccgattaataggcgcaccaaagttgttttaccaaccccgtttggaccgattaaactcgtcatgctaccacgttcgatcgtaaaactgagatcttttagtacttgtcgattactaaaggcaagccctaaatgttgtgcattcactaattctgtcattttgaatcctgagcctttctaactgcatcaaattgctgttgcatccatgttaaatatgtttttttagcgggtagtgtttcagttacttgtacaactggcaccccttctttatccgctagttcgtgcatttgtttaataatgggactttcttcttgcttattaatcactaaaaaggcaatctgatgggttttaattaaatcccgcatcgttgtaatatcttttggtgatggatcggtcccatcttcaattgctttggcaaagtgttggttagcgactttgtaacccatttcagccaatgcatagtcaaaaacgggttcactaacagccacttgttttcctttggcctgcgcctttagttgttggagttgtgcgtctaacgaagctaactttttaagatacaccgcaccattttgctgatacgttgccttatgtttcggatcgcgcttgctaaattcagtcactaatcgcttggtcaatgttggcatcgtctttaaatcataccataaatgttcgttagcgccattagattgtttcattaattgactgactgtcaacacagtttggtcatctggttgggcactcttaacgactttgtttaaccagctgtcgtaaccaagcccattttgaatcacaatatccgctttagccacgagtttagcatcattggttgttgcttcgtatgaatgtggatctaaactgggactattgataatcgacgtcacgtgaccttgattacctaaaaccgcttgtgcggcctcaccataaaaatcgagtgacgatacaacttgaatcccactcgcctttttcgtactctgaccacaaccagccactaatagcattagcagtaagattcccgccatgatttccaaaccttttttacgcatctttttctcctcttttctaaatcgtaattattacgttttactaaaaatattttacacgagtctcactaattgtcaatcatttttctgaaaacacttaaaaagggattgggacaaagattgcttttgccctaaccccttttttgaattgttgaactttaaacgtgttctgtaagtcattctcctccggttaaccctgagtcgcaaacaattactacaattattcacgctctgtgttaatcctcggagtatcccgacttacgccacactctttaattaccagatttgttccactgcacctgttgcttggacaacaaaataacctgcccgtggttgatcttcgtttggtacgtaaatattaatgagatagccttgttgtccaccgcgtgtgattaaaccattattcaaatacgatgcggtttgaccaaattgtgagccaacttgttgaaccaccaacttaatcgcttggttgccatctacggcagttgtttgttgtggtgtcgtggtagtcgttgttgttgcactgctgctagattggctcgcagattgactactgctacttgccgttgtagcagtggatgatgattcagcaacacttgcagttgatgaacttgcttgtggggactctacttcagttgaagatgccatcgccgctttggagctcgcttttaattggcttgcactacttgaaagttcactttcgcgttttgcaacgctactttcacgtgctttgagactagccgtggttgaactttgcttggcatcagcatcttgatttgccgtactactttgaccacaggcccctaataatagtagtcctgataccaaaactgtactaactgtaaccatctttttcataataacccctccaactcctattgattcatctttattctatgagacacacctcagaatagcaattaaatccacatctgatttaaaaatctttaagaaacacgctgattagcttaacttagcagccacttgcttggcaatcaccatatcagttggatatggtgtatcgaccccgcgtactttctgataagcatcggcccctttagccgctaagacaacaatttcgcccggtttactttccgtaatcgcctgttcaatcgctgttggacgatcaatttcgatggtggttgtcaccttatcctggtcaatcccggccaaaatttcagcggcaatggctgctggatcttcaaatcctggatcatcagtcgtcaaaatggcccgatctgcatattcattaaggacttgcgcaaacccagcacgtctagaaacacctttatcgccaggactaccgacaacaactagtaggcgtggttgattgtattccttttgcaagaaactcaagagcgccttcatgctggcataattatgcgcgtaatcaacatatacttgaccatgtcctggaacggctaaggtttccatccgtcctggaatctgcaagtcgcgaatcccttgttgagctgcgattaaatccgcccctgccaaaccggcaccaatcactgcagctgtcgcgttactttcattgaaatccccaattaaacgcaattggtaatcaccagaaacaccaagctgaatggctcgttcagaagccgcggtaactttaaaccgactttctgctaagcccgtttctagattttcaaagcggaaatcaactgccaccggaattgtaggttgataatccgtttcggcaaataagtaaattgattccggagcagtcgtcgtagttgctgcagcatacacatccgcaaaatattgcgtttgcgcgttaatcacacagtatcgtgagttgaccaataattgtaatttgcagtgtaaataatcttcaaaattaggatgttcatttggtccgacgtgatcaggcgaaatgtttaggaagaagccaacatcgaacgttaagccgtacactcggtttttcttatacgcctgtgacgaaacttccatcactaagtgcgtcatcccgttttcaactgctttgcgcatgtcgcggaataaatccaaactttctggtgtcgttaaattcgatttgaagcgatcctctggtttaggccctaagacacgatcaattgttgaaaataatgctgttttttgacgggtcgtcgcttgtaaaatcgattgagtaaagtaggccgcagttgtcttgcctttggtcccagtgtaagccacgataaataaatcatcttgtgggtaatcataaaaagccgctgataaaaccgccatcgctttttggacgttcgtgacgattaaggcgttcatcccgttgccttcaacaatcgcttgttcggcaacatatgttacggcccctaattcttttgcatttgttaaatagacgggacgaaaattccctttacagaaaaagagcgtgtcctcagttacctgccgtgaatcatacgcgattccggtcatatttaaagtcgggtcaccattaagcgccacacttttcaataaatgatgctcttttagaattaacgtacatgcatctaatgttaaagccattttcgtcctcctcaaaatccttgtgaatggttttaattatagcacgatttaatcatgctgcgcttgaaacggcttataatcgtagccataaaaaaacgcgccaccgttaagtgtcgcgtttcaattccaactaaaataggttcgtgaaaaattctttgatcccttcaccgattaaaacaaataaattggctttggggtccgctgttttagtgcgtaattgtgattgtggcgcttgtccgatataccgcgtagtgacaccgttcaattgtggtgtcacttgaccaatttgcacattctttttaataggtgcttccaattggcgttttgcaccacctttgactgcttggtaatgccagtcaatgttggctgctgtggttccttttggcacccacattgaaatagctttgttcgtaatcaattgcactgtcttttggcgaccatatttaaccgtcgctgtcttataaggtgcgagactctgattggcttgtgccaattgtttttgttcccaaccatcgaagacatattgcattaacttgttagtttcaatgaaccgccggccagtatcttcaccattggcatgcatcaccactgttagaatccgttgcccatctttcgtcgcagttccggtaaaacaatcgcccgctttgtccgttgtcccggtttttaaaccatcgaccacgtagtcttgcggtgcattattttcgccaggtaacattaagttccacgttgacatggccgtttcatcacttgtttgggcgccaaatgtaaaatgcgcttgcttggttgtttcgagaatttcaggataatcagccaacaacttttgcgctacgagtgcgacatctgccgcactcatttcattttcagcatcagccggactgcctggataaacttcagcgccgaggaattcattgttcaagccggacactgaataaagttgtgcgtcttgaatgccccaatccgccactttttgccgcattaaatcgacaaaatccttttgtgaaccggccacttggttggcgagcatcatggctgcatcattcgccgaagcgaccatcatggcttggaaaagtgccttgacggtatattgtccgtccgcttgtagaggcacattcgttaaatccttattttgactcaattgataaatgaggtcatcgggcttcaccgtttgttcccacgttaacttaccttgcttaatttgcgctaacacgatgtaggctgtaatcatcttcgtcatcgaagcgattggcaacgcctgatccgcattttgttcgtataagacttgtccagttgctgggtcgagcgcaattgctgcactcgtatcgatttgaggggcggtcggcaaactcaccggcgtacttgccgctgcgactttggtagtctgggcactcaaaagaccgccaacgggtgcaattgccaataggccgaccattacatattgtactaattttttaaacacaacattactccttaactgattttgcgccagcagtttgaggatcaatccgccgacctaacttcaaaggtaagtgtatcacaaaactggttaattctggcgtcgaatcagcataaatataaccgccatgtaacgcgacaatactttgggtaattgctaacccaagtccagtgccacctgtttcttgtgaacgcgatgcttcaacgcgataaaagcggtcaaagagttggttcaatgaatcacttggaatttgttgaccatcatttgacactttaataatcgcctcttgaccgattttttcagccgccaacgtaatttgtttgccacccttgccatatttcaaagcattagcaattaaattattgaagactcgaccaagcttttcagtatcggcttccatcatcagtggtgcaggattacaagttacattaatctgcatccccttcttattcgcttctaactcaaaactggccgctaattgatctaacatctgctccatatcaaacgttgtcttggtaatgggagtcgatgtttgccgcaccttcgtgtattcaaataaatcctcgactaaaaccttcatttgttgcgccttcacgaaagcagtatgcgtatatttggttagttcttccttggtttgatactgattatcttcaattaaaccaagatatccgatgattgaagtcagcggcgtccgcaaatcatgactgacattggtaatcaattcgtccttactcttttcaatcttgcgttcttcttccattgaacgcacagtactatcaaccagcgtgttcacactatcgatcacgcgttgcaaatcacggttgacacgcaaattaatccggtggtccaaatgaccatcggcaatgtaatgcaactcaccaatcacgtgccacatctgcatttgatggtaacgccgaataagccgccaatagacgactaacacatcggcaacccccatcaagatgacaaaccaattttgccaactccaaatatgccattcattcggaccaattgtaatggcgtttttaatcatccatacgccgccgcttagttgcggattattcacaatcgcctgttgtaacagcaccatgattgataaatttaatagtaataacaaaataaccgtgatgataccctcggcaaagagttcgctcttttccttagcggttagtgccactttttgcaggttcttttctccttgatagtcagccattaaacttctaccttatacccaacaccccagacggtttcaatcactttttcaccatcggttgcttcttcaattttgtcgcgcaaatgacttacatggaccatgaccgtcttggcagagacgatactttcttgtttccagacccgttcaaaaatatcgtccgctgaaaagacccggttggggtgactggcaagtaagtataaaatcccaaattcaagtgcggtgagttggatttgcttgttattaatcgtcgtcacttcatgtgagtcgcgcttaatgataagcggaccaacttctaagacatccggcacttcgttggccacttgttgttggctccgccgtaacaatgacttcacccgcgccatcacttctaatggattgaatggttttgaaacgtagtcatctgcaccggttaggaggccttgaatcttgtccatatcagttgtcttggcagacaccacaataatgggcacttgtgaatccttacggaccgccttaatgacttcgataccactcatattcggcatcataatatccaagatcatcaaatcaatatcgggattcgtggcaattttagtcagggcttctttacccgtgaaggcttgaatgggttcgtaaccttcgtttttaacataaatacttaataattcaacaatttctttatcatcgtctacaattagaattttcataatcgttacctcgtttaatttaacatcattttgcatgattcgctttcattgtaacaaactatcttctacttagggttaaagaattctttaaatcctccccatcatttaaccacaaaaaaaggatttaagtcgtgcaaaacgctcgacttaaaccctgatagaaatgatttgaattaacgtgctgaatagttaggtgcttctttggtaatttgcacatcatgtggatgtgattctgtcaaaccagcatttgagatttggacaaattgtgcattatcttgtaggtcctgtaaattagcagcaccaacgtagcccatccctgaacgtaagccaccaagtaattggtaaattacatcgccgagtgcgcctttggcagccacacgaccttcgatgccttctgggactaacttgttggcttcattcacaccactttggaagtaacggtctgatgaaccatgcgacatagcagccaagctgcccatcccacggtatgttttgaaacgacgtccttgatagatttcaaattcgccaggtgcttcgtcagtcccagctaacatactaccaagcatcacaacgtttccaccggctgcaagagctttaacgatgtccccagaatatttaatcccaccatcagcaatgatggttttgccatattcgcgggcaacactggcagcatcgtagatggctgttaattgtggtacaccgacaccagccacaatccgagttgtacagattgaaccagggccaatccccactttaacgacatcaaccccagcatcatacaaggcttttgtgccttctgcagttgcgacattcccagcaatcaaggttgcttcagggaagcgttcgcgaatttcactaatcttacgtaacacaccagctgaatgaccatgcgcagtatcgataatgatcgcatcagcccctgctttcaataaggctgcagcccgttcaaaagtatcgcttgtgacgccaacagcggcagcaactaataagcgaccatattgatccttagccgcattcgggaattcttgcactttttcaatatccttaattgtgattaatccggctaagcgaccgtcatcaccaactaaaggtaacttttcaattctgttttgttggaggatttgttcagcttcttctaaagaagtgccgacaggtgcggttacaagtgcttcgtgcgtcatcacggttccgatttcagcagagaaatcagagataaaacgtaaatcacggttcgtaataatgccgactaattttagatcatcgagatttgaaacgattgggacaccactaatacgatatttacgcatcaaatcttcagcagcactaacgggtttatccgctgttaaataaaatggatcaataataacgccattttctgaacgtttaaccttcaagacttcatctgcttgacgttcaatactcatattcttatgaatcacgcctaaaccaccttgacgcgccatagcgattgccatgggtgcttccgtaacggtatccatgctagcactcataattggtgtgtttaacttgatattctttgcaagttgcacccctaaatcgacttcgttggggagtacatgactctccgcaggtattaataaaacatcatcgaacgtaaaccctttttttgtaaactttgattcccatgcagacataatcttcctccaatttgtgaactaaattaaccgccgacccatcgattgttcgtattatctttaatcgataaccagtttaaaatttgataaaatattagcagatttttctgcaaacgtcaataaactcttattgaaaattcattttcatcaatatcgtgtacgaatgaatcacgaacatttaaaataagggtgcacaccacccagcttcgttatacaatagaaataactgattataaaggatggattggcatgcaagaacaacaacgggttctagatttaacacgaagttataacctacgcgaattaggcggttaccaaacggttgatggcaagtccgttaaatggcacaaattattacgttcaggtagtttgaacgcgctaaccgcaactgatattgaggatctcttaaattacggtgttgcttacgatgtcgatttccgttcacgtcatgaaatcaaggtcgcccccgacccatttgatgacaaccaactaacctaccatcgtctttcggtatttccattcactgaccaagccgatacccctaaaaagccagccaaaaaaggcctaatgcggctttttggtaaaaaagaagctgctactcccgaacgatcaagtatggaccggatgtaccaacaattggtcaccgactcccatgctcaagcaacttatcgtgatttatttaccgtactattaaataatcacgatacaaacggtgcagtcctttaccattgctcagccggtaaagatcgcactggtgtcgcaacttttttaattctaagtgctctcggcgtcgactggaaaacaatcgttgccgactatgtcctctcaaatgaggtcctaggactcagctcagcaaccccaacccgaatttcaagtaacgatagccaggtcgcttcaatgaacgctaagagcattacacaggctaatctagaacttgtccgcgacacgattaatcaagaatacggcaacatcgaaaactacctatcaaaggcaatggccctcaaaccagaagaaatcaaacaattaaaagaggactacttagaatagcgtgcgactgcaaatggttatccgctgaggattagcctaaaaaggcgaacacaagcaattgtgttcgcctttttgaatgatcttttaatgactcttaatataattttcgccatccgctgctggtgcgacggccttgcccaagaaaatcaccagaataataatcgtaatcgcgtatggtgcaatctggaaccagacactattcacaccggccagtattgggatgtagccgccgataatcggcaaactttgtgcgagtccgaagaaaatcgatgcacctgtcgcgccaattggatgccacttaccaaaaatcatcgccgccaatgccatgaagccctgacctgaaatcgtcgctgcgctgaagtttaacgtaatcgactgcgccatcaccgcgccaccaatgccgcctaacaaaccagacaacatgaccccgatataccggtaacgactcacattgatgcccagtgtatcggctgccgctggattttcaccgactgaccgcaagcgcagcccaaaccgcgttttatacagcacataccaactgataatgccgaccaaaaccgcagcgtaagccactaacgacgtcttcgtaaataaaatggggccaatcactggaatttgggccaagccggggaatgtgaagttaccgatgctttgattaatcaccggcgtttgccccttaccgctatacagcacacgggttaagaagacacacaatgcaggcgccaataggtttaacaccgtcccactaataatgtgattagcgcgcaatgttacggtcgctaaagcatgtaataaggagaacagtgcaccaaacagtccaccaaccaataaggcaatccacggcgtcaatccgccaaaaaccgtactaaattgaagggtaaagacggcactgctgaaagccccaacaatcataatcccttctaaaccaacattaatcacaccgctatgctctgaaaaagcaccacccaaggctgtaaaaatcaatggcgccgcgtaaactaacgtggtcgcacaaatcgtcattaaaatcattgtgattgtcattatttttcaagcctctctttcatcaacgcgtgttttttcagtaagcggtgattgagtaattgttcaaataagaagcgcacacccacgaagaagataatcgatgcaatcacgatattgacgatttctgtcggagttgttgagtagacggaaatgcttaagccaccaatctgtaaagcagagaataaaatcgccgcaaagataatcccgattggatgcccattcgctaataacgcgaccgccattccattaaagccgatatctggtaaggcatttgaaacggaaatattttgataattccctagaccatcgacagcccccgctaacccagctagtagtccagataatagcattgcccacataatcgtttgtttcgtattcatccccgcgtaacgtgcagcttgttcgttcaatccaactgccttaatttcaaatccagtcttcgaccgtttcaaataccaccacatcacaatcaccaagactaacgcgatgaaaaagccccagtgaaacgttgagtgattggtaatctgttccaaaaaaggggtccgcaagcttgctttagggacaatgttggccgatgagtcgctgccttttggcgccaaccaacgtttaatcgcaaaattgacgaaatacaatgcgatgtagttcaacatgatggttgtgatcacttcactggtcccaaagtatgcccgtaaaaaaccggccaaccaagaccaaaagccaccgagcagcatccccgctaaaatcgcgccaagaatcaagagaatccccggtaaatttttaaagtggagtgcaaagacaatcgcgccaaaccagcccactaatagctgacccgacccaccaatattgaaaaagccggctttgctcgcaattgaaaagccaagggctgtcaaaattaacggagtcgcattgcgtaatgtctcgccaatcgaatagatatctccgaatgcgccattaaagaggttactgtaattttgaataggcgaatatccaaaaaccaacatcacaactccgcccactaacagtcccgccacaacggataggattgcaatgattaatcctgaagattgttgtttattcattcgtctcgccctcccactggttgttgcccggccattaataatccgagcgtctgactcgttgtggtttgtggatcaacttcaccaacaatttgaccggcgtgcattacaagtactcggtcagctaactttaaaatttcatctaattcaaaactaacaagtaaaatcccacagccttggttccgttgttcaatcaagctctgatgaatgtattcaatcgcacctacatcaacaccgcgggtcggattggcagcaatcaagacttttggttgtttggcgatttcgcgcgcaaccaccactttttgctgattaccacctgaaagttctccggcaagcgtttgttcagattgcgtccgaatgtcgaatcgtttaatcagtttctgcgccgtttgattgatcacccgataattaagccagcctagatgactatacggttgatggtaataatccttcagcgctaaattttcagcaatcgacagtggcaaaatcaaaccgatattctggcgatcttctggaatgcaccctaagccttgttcactaatttggcgtggtgtccgtttcaataatgactgacctcctaattcaatttttccagactgcggttttaattgtccggttaaaacctgaattaactcactctgcccgttgccatcaatcccagcaattccaacaatttctcccgcatgcacggtcaatcccagatcatctagaacagtgcgtttagcaacacgagcagcgacatgttccaccgatagcatcacagcgccttgattagccattttcggtgtgggggcttgttgcggacggccaaccatcatttccgctaattttgtcggatccgtttgtgcgactagtaccgtatcaatcacacgtccggcacgaatcacgacgcaccgatcagcaacttgtttaatttcctttagtttatgcgtgataaaaatcaacgacttcccttccgcctttaacttctcaaaaatggcaagcaaggcttgaatttcattcggtgtcaaagctgcagtcggttcatcaaaaatcaatgtcgttgcttctcggtaaagcgccttgataatctcaacccgctgttgcatcccgaccgaaatatcagcgatttttcgatcaaggtcgagcgccagttggtatttatcgactaaagccgtgaccttttgccgcgccgttgcatagtcaatccggccctgtttagttggttcgtcacccaggataatgttttctaagaccgtaaaagccggaattaacatgaaatgttggtgtaccatcccaatcccgagggcttttgcatgtcgagggccatttaaggtcactgcttgtccgttcaccagtaattgccccgcagtcggctttaattgtccggtcaaaacacccatcaaggttgatttccccgcaccattttcaccaagcaaggcaaggatttcaccctgttgcaaggttaatgaaatatcatcattggcggtaaaggcgccgaaccgttttgtaatgtgctgcatttctatcacagtttttgccatttttacgctccattcattaagcatacaaaaaggatggctgataactgctgccatcctttagcattcaatagtcgttattctgcagcaactttaatggtgcctgattcaattttttgttgatattctttgactgcttgccatgtttcaggggaagcattgtcgttcactaaggcaacgcctttgtctttcaaatcatatgtgacggttttgccaccagggaatttatcattcttagcttggttagcaagatcttccactgctgtgccaacttgtttaacggcagatgctaatgtgacgttgccaccatcatatttcccatcggctttttgatcttgatcaacaccaatcacccagactttttgaccacccttagaaatgttcttagcagcggtaaagacgccagcgccagtgccaccagcagcgtgataaataacatccgcgccgttgttgtacatcgcggttgccaatgattggccgacatcggctttcgtaaatgaaccagcatatttcacatcaacggtgattgctgggttaacggctttcaccccttgtttaaaaccagcttcgaatgttttcacgacggcactatcaattccaccgacaaagccgactttattcgtcttagtggttttcgcagcggcaaccccggctaggaatgatgattgttctgttttaaaattgacggacgcgacgtttttccgattcttaacgtttgaatcgatgattgcaaagttaacatttggattattctttgcagattggctgaccgcgttatctaacttatagccaatcgcaaaaatcgtttggtattttgccttgattaacttattaatgttcgggaaaaagtccgcatcagaactcgattgtgcgtaattgtaaccattgaccccttttttaagatcatgactagcaccccatttttccaaaccttcccaggcagattggttaaaagatttatcatcaatcccaccaccatcagtgactaaagcggctgtgtgcgttgctttctttgatgctgtcttttgactcccgcacccggctaacacgccacctaatacaaggactgtcgagaaaagtacgaccaaactttttttcatgaaataagcctccgtcaataaatttgataatttattataaacacgttatcgacataaaatcaatacattgatttcattttataaaatattgttcgtttatattgtatttgttgctaagaaatatagataatgctaatattaattgataactaacgaacaatcaggaggcgaaccatgcaaacacaagtctattttaatcacgatggcggtgttgatgatttgatttcattaactctgctcctacaaatgccgacaatcaaactacttggcgtcggcgtaattggcgctgattcatatgtcgaaccagccgttagcgcgagtcgtaaaatcattgatacgttttcagatcaatcagcgcggttagctgtggccgcttctgactcacgcgcagtccatccttttccaaaagaatggcgaactgacgcttactcagtcgatgcacttcccgtgctcaatgaacgtggcaccgttcaaacgcctctgagtcctgaagccgcacatctcgatctaatcactaaactcaatcaagcaaccgaacccgtcacattgctctttaccggcccattaactgacttggcacgcgcactcgccatcaatccaagcatcgaatataaaatcgctaaacttctttggatgggcggttcttttcttgaacaaggcaacgttgctgaacccgattctgatggtactgctgaatggaatgccttctgggatcccgaagcagtgaaaactgtcttcgatacacaaatccctattgaattagtcgggctcgaaagtacgaataatgttcccttaacgccggcgattcgccaacgttgggctagtaaacgtgccaatgccatgatggactttatcggcacctgttacgcctttgttcctcaactggtccatttcaaaactaattcaacttattatttatgggacgttttaacaacttgttaccttcttgatccaacaatcgttaaaacaaaagccattgtatgtgatgtcattccaaacggaattgccggcgggcgcacgttcttaactaaaaacggacgtccggctaaactcgtctacgacgttgatgcagctggattttttgatctaattgaaaccatcataaaagcagactaacgcaaaaaggagcaccgacttatcagtcagtgctccttttttgaacgtgctttcatcaacagcttcctgtgctttgctacacttagcaaagcggtgcttgcagcgccaattcgctaagttaggcaaatgctcagaagctacccgttgatgacgcactccttttttgaacgtgcttgctaaactaggggaacaactttgtaaaggggctgtttgaatgacgactgatttcaatcaagaacaagcgcatctatccactgtttatcaacaattaaccaccactttgacggccatcaatgatgcccaatcgcaaaaccagaaaaacggcaacaccatcaaagcgcagatcaccggtgaagccaaactcaatttcgattcatacgctgataatcttgatacattcgctgctttagaaagtatcaacaaggaaatcgatatgctcaacctgaaaaccgattcgctcgttgcacgtcatgatgagaccttacggctgttagagcaaccctactttgcaaaaatcacgctgacttttcctgaggaaatagacgccgaagatttttaccttggttcagctagcttcacaaaccaagccggcgatcctgtgatttacgattggcgttcacctatcgccgatgtttattaccagcaaacattcggccccaccagttatcaagctaacggtcgcgccattgcggtcaatctcgaccgacggcgccagttccaaattcaagctgatcagctaatcgatttctttgatacgcagattgccatcgaagatcccttgttattagccactttaaaagaagccaaaacaacgcaaatgagcgccattaccgcgacgattcaaaaggaacaaaacgcgattattcggcaacaaacgactgaccatttactcatcgatgggattgcgggcagtggtaaaacatcggtcatttttcaacgcatcgcctatttcaagactatatcgcccaagttttaccagacttaggtgaacaaacaccagtcaacttaaccctacaacaactattggcgcaattgttaccttctgatctagccgcactccccatcgctgatcaaccagctactttgaccatcacacaattaacgttgcaggcgagcgatttccaatctttaagccctggtttaccgctgacgattgatgccgcaacaagctaccaattcttcttaaaaacaccggtggataccccgcttgataaacgaatacaagcaactcagcaacaactcacaagttgtctacaggaaagcatcacaaatgaagcccaatcagcagatgctttaactcgacttgaaagcctcactgaaaccgagcaacagcgcttattcgaccgcttaattcgcgaagatgaaccactagcaccgctagcacgcaaaatgattcgtcatgattaccaagacttagctgatcagctaagcggttatcaatggcttgcttttgatcaaataattgcccgtcaaacaccgattgatgctgttattgcagctcagatttatgcttatttaacgcatcacgtcttcccaaacgttaagcaggtctttatcgatgaagtgcaggactatcacgcaagcacgttatctctttttaaacaacttttccccaaagcacagttcacggttttcagtgatcagcatcaaagtattaccccgcataaagtacaattcgaacaattacccaccatttttccacaactacaaactgcggcactgcgcacaagttaccgctcatccggtgcaatcacgacgttatttagtcagctattcaccgatttaacagatgtccatgccgttcaaccagcaggcaagcggccaacgacgatttgtgcgactgattttaacgactacctcacccaaatccaagctcagattgaccaactaccaactgaccagaccttagccatcatcacacctgctggtgattttgacgagcggttgactggcctcaaaaatgtccaccacttatccacagaaacgacgaacctccccgaaaccggcgccttcactttaccgctgacgctggctaaagggttagaatttgataacgttttgttgtacgatctgactaacaattattataccgagccaactgtcggccacaaccgcctctataccgccatttcgcgggcaacgcatcaattgacgctcagcgcactgggcaagttgccggttgaattaaatggccaataaattggtcatttgactgactaggctagtcctcaaaatataaacgctcgctgtcgcactctattcaaatacaaactgattgttgtacagttcggcgtagaagcctttttcgtctagtaattcttggtgactgccttcttcgatgatgcgaccgtctttgaggacgataatgcgatccgcattgagaatcgtctttaaacgatgggcaatcacgaaactggttcggccttggatgacgttgtccatcgctttttggatatgactttcagtcaccgtatcgacgttacttgtcgcttcatccaaaattaagagcgctggaccggtgataatcgtccgagcgatactgatcaattgtttctgaccggtactgaagatgttatcttcttcactgacagccgtttgataaccatcatctaacgtcataatgaagtcatgaatatgggcttgctgggcagctgccaccacttcttcatctgttgcatcgggtttcccgaagacaatgttgtcgcgaatcgttcctgagaaaagcacggattcttgcaacacgatgccgacgtgcgagcgtaatgcatccaaatccatttcacggatatcaatgtcatcaatcttgactgcgccttgatcaacatcatagaaccgattcatcaagttcatgacggttgtcttcccagaaccagttggaccaaccaacgcaatcatttggcccttatccacttcgatattcacatcatgcaaaatttgcttacctggtaaatagctaaagtcgacatgttccatggtcacggagcgttcaatgccctcaaattgcacaccgtcggttggacgcacttcatcgtcttcatcaaacacttcattcactcggcgggcaccggtaattgccaattgaatcatgctgtaactcgatgaaagttgtgcgatctggttatagaattgttgtgaatattgaacgaatgttacaactaagcccaaagcgatcgactttttaatgtcaccgttcaccgctaaccagctaccataggaaatcacaattgcggtattcaccaacgacatcccttgcatcaacggaaagatcatcccagaataaatctgaccttttaaagtcgccttgcggacattttcattatgttcaatgaagccatcaatcgtttcttcttgaaggctgttagtaataatcactttttggcccgtgattttttcgttaatgtagccattgagtttcccgacttcatcttgttgcacattaacgtatttttgcgctttattaatgatgatccaagcaaggatgaatgaaattgggacggaagcaattgtcacccaagcgagctgcacatcttttctaaacatcataatcaataaaccaattaagagcgccgtgcctgatacaagttggctcaacacttgattcatcgcattgtaaatattatctaagtcactcgtaaagcggctgagaatatcgccatctgaatgacggtcgaaatatttaatctgcattttttggagcttattgaataacccaatccgcatccggttggttgataacgcgttgacgcgtgagaaaaccgcgcctgataccaacgtcgctgctgaactaaagacgtagaataaaatcaacgatacaatcacctctacgaaggcgtctttagatgccccactggttggcaaatgttgggcttttaaaatttgaaatttcgttgcatatttgactaactcattgagcgcgtccccgatatattcgggtgctttcacctgaagataagtcgcaatcacagtcatcacgaggatgattgcaaaagaaggtttataccgctttagataatggaaaaagaacttcattgctcggttaaattctcgcattggttatcctcgctttcctttttgcgtttcaaagatttctcgatagacatcactggtttcaagtaattcatgatggttaccaacaccgactaaacgaccttcatctaacactaaaatccgatccgcgttgaccacagatgaaatcttttgcgcgataattagtgttgttgtgccagctaattcacggtctaacgcctctttaactaatttttcagaccgggcatctaaggcactagtactatcatccaaaatcagaatcttcggttgcccgattaccccccgtgaaattgagagccgttgtttttgaccaccagagaagttcgcactgcgttcttcgacggttgcatcatattgatcagcaagcttttcgatgaactctttggcttgggcaatccccgttgcgcggtccatatcggcgtcatccgcatcttttttcccgtgcttcaagttttgtgcgattgtgccggagaataaaatcgctttttggaggacaaatgaaacggcgctgtgtaaattatgttcgtttaaatctttgattggcacgccgccaattttaatctgcccttcagtcggatcgaacaagcgcggaatcaattgcgccatcgttgacttaccggccccagttgcgccgacaatcccaatcatttcaccagcgttaattttgaaattaatatctgttaacgtgttacgatcgtcttctggataacggaagctgacgtgatcgaattccaacgtccccgctaagtcttgatcagggacatctggataaacgatatcaggctctgttgaaagaatttcttggagtcgcttcaacgaaactgccccacgagatgccatcatcatcatcatgccgcccatgatgatcgacatcatgatttgcattaagtaattcataaatgaggcaatcgccgcaatcgcttctggatccgtatcgactaagtttccaacgaaatagattgatgcgacaaccgctaagttcgccaccaacatgaacgctggaatcatcacagaaaaaagcatcccgacgattgtcgtatggtgttctaattgattgcttgtttttgagaagcgactgatttcgttatcttcttggacaaaagacttcacaatccgcgtgcccattaaattttctttagcgaggttattaatcttatcgattaaattttggatggcaccgaagtgtttccccatcgaacccattgataagaatgtaatgatgaagaccgtgatcactaagagcacgataatccaccataaactcggaatcgaattcatcgcaaggatgaaactgccgacaaataaaatcgggattctaaaaatcgtttggagcgtcatcataatgacgttttgaacctgggtcatatcattggtcaaacgcacggataaattcccaactgagaatttttcaatattggcaaatgagaaagtctgtatcttccggaaagtagtttcccgcatatcggcagtcattccctgcgccgtcatcgccgacgtaatggtgttgaccacgcccgcaattaaaccaaccacggcaattacaatcaaataaattccaatttgacgtaccttatcttgatcgcctttcataatcccttccaaaacatcttgtaatagttttggttgccatagtgaagacgcaacagaaataaccgtcgctaaaatggaaagactaaacacgccccaataaggctttaagtgctgtttaagtatcgacatgagcatccctctttttctgtagttgaatctcctgtacaaatcctgtacagtataatcgaacagtgttcgagttactactttatcaaattttaaaacgaattacaatcatcttttcataaaaagtgaaggagcttcattaatatggtaaaacagtcaatctctgccgagcaaatcatcactgccgcgtttgaaattttacaagcatccgggaccgtcgatgccctttcaattcgtaaaattgccaatcaattagacatcggggcggccacattttactggcatttcgaaaacaaacaagccctcctacaggcgatggctgataacattattcaacaaattgagattgagccatgtaacacaaccttagaatggacagaccaaattcgccaaatttttagcgccatttacaccacttacatagcacagccctatgccgctgagttgatgatgcggaccgtccctgcaactaaggcccgcctaggtcttatcaaccacttaattcaaatccttttggatgccggtttcacgccagaacaagcaagcctagcgattgaatccatcgatcacttcatgtccggtctcttcactgacatcaccggtgagcttgagatgaaacatcgcgtctcacaacataaagacacttatcttgcacagttaccgcttaaaatgcagcagattgcgactgacaatcattacaatgctttcttaaaaacttttgaacatcatcggcaccaacaacaacgctcactggaaaaattcatgctaggcctcgatattttcctcgctggtttgcaacaacaacttgcttaaataaaaagcgcgcagacaactgattgtctgcgcgctttttacatttaaactgcttttgaacgaatcccgaatccataactcagagccatcacgccgacaatcatgatcatgtataacggtaatcgagtattcgatcccgtatgcaatagactcatgccgtacgttaaggcgctgattgcgaggtagtagccaaaactaaacaacccgctggccgtgccgatcacatcttcgtaacccactaatgctaaattcaagaccaccggtaaggtcgtattcaatccccacaagaaaagaggccgtgggacgacctcttcttttgtgggtttctagctttaacgcgctttttgaaactgacttctgtgcttagctccaatccgtaaacaatcgactacgtcgctcatttacagatttaggctagtgctcgaagtcaaaccgtttcaaacgcgcttctatttctttaacgtgcttttaattcgcaaccttctgcgccttgctacatcaaccagacaatcgcccttggcgcttatccttctgattaggcaagtgctcaaaggctaaccgcgaattaacgcactcatttttttaccagcttgcttttttgacgcctgggatttggcctttatgggctaattcgcgaaagttgatgcggctcataccaaattgccgcatgaaacttcttggtcgaccatcgattacatcgcggttccgcaatcgcactgggctagaatccttgggtaattgagaaagggctaagtaatcgccctttgcttttaattctgcgcgcaagtcagcgtatttcgctactaatgcgcgttgttttgctaattttgccacttttgatttttttgccattgataaaactcctttttaccgtgctttcaaaagcatcctgttccggttagctacattagccaaacaatcggttacgccgctaatttggctaattaggctaatcctcacaggataaccacttttgacgcactcattttctttaacgtgcttttaattcgcagacttctgcgcttagcaccgtgaatcaaatcatcgacttcgtcgctaattcgcttccccgtactaatactcaaaagttgattaagcttgaacgcacttttccccgattgaaatagcctacgctaactatttatgaaatgcaattaaaaagacttataaaaagtaaccatttttaaacactggcctgtgctatacttaatctaagttgatttcacagaaaggggcactttcagatggcccaaaaaaacattctccaatacttaattctcgggctgttaaatcagtctcccaaaaccggttatgatttaaaacgcgtctttgaagatgatatcggtgagttctggcaagcccaacacagccaaatctatcctgaactcaagcgactcgaacaggctgatcggatcacccacgtcgaattgatcgccggaacaaaattaaaaaagaagcagtattcaatcactgcagatgggattgccttttttgacgagtggcgatactccccaaccagcgaaattattgccagcaaagacgaatttattttgaagctatactttatcgactcaaaaaatgatgctcatttagacgcaatgttcaccgaacaaaaaaacttacaccaagccaaactagatcacctactcgaccggcgtcaaacccttttcagccaacaagctgcggtggatgcgcactatggtcattatcttattttagaacacgcgattaaccgcgaacaagactatcttaattggttaacaaccgcacggccgtaaaatcgacccttaacaaatttgagataagtgctatcctattagtaagaagtaaatcaagttaggctgtttcttcatttgtatacgttataataacgcgcttgtacaggtggtcagttgaccaattgtatgggcgctttttttgtttgatccagcaacctagactttaacaaattcaggaggaatattattttaaagcgcaagaatgttgataaagtcgtcttcatccccacgatgttactgttcgggattgtctccgcatttttaatgttggggggtgacacgcttcagcagtcgatttcacaactacttgatgtgatgacggcacattctaaatggctttacattggtatttatatcattaattttattttcctattttggttggggtgtagtcactatggccatatccgcctcggccaaccaaatgaaaagccagaatataacgacttccaatgggggagtatggtttttgcaactgggattgacgctagcatcttaatgcttagtaccactgatccactgcaatacttacagaacccaccatttggcgctaaacctttctcggctgaagcataccgctacgccaacgtctgtgggcaatttcactggggacccatggcatggatgatttttgccaccgcgactgtcgcaattggctacgctctctatgttaagaacttacgggtacaacgtttaagcgccgcaatcgacctattagaaggaccacaaccttacaaaaaaataattcgcaaattaatcgactttaccgttgttttcggcattatggggggcatcggctcatcaatcggaatggaaattcccgtgatttcaaaagtcttgagcacaatgaccggtttgaatgataccatctggcttaaacttgccctcttcattatcttactggtgctattcaccctcacggtatatgccggcttagataaaggcattaagaagctcagtgcttggcatatctatactgccattggctttttattactcgtcttactaatcggtccgacattcaagctaattggcgctgaaggccgcgatgtcttccatctctttggtaacttcgggcgtttaagtttaaatcagactggtgcacacagtgcgttcgcacaacacgaaaccctcttttactggggatggtggttatcttacatgcctgtcatgggcttattcatcgctcggatttcacgcggccgaaccattcgccaagttttattgggaatggcgacatacggcgcatttagttgtatgagcttttacgctgtacttggcggttatgcgctcttcttacaacgttccggtcaaatcgatcttgttcatctattgaatacccaaggacaagccgctgtcatcgcggcggtcatcacgaccttaccgttcaaaattatcatgttagcaattttctgtctgtcatgtttcattttcctggcgacaacgatctcttcttcggccttcatcgtctcatcatttaccagtcttgaattgaaaatcggagaacaacctaatcgttggaatcggatggcttgggtgatcattttcattctattttcacttggaattgtacttgtcggtagtttccaaaccattcaagccgtttgcgtgattgctgggttcccattgatttttgtctgcgcattattgctcgtttcgatttttcacgccgttcatggtggcgagattcccattgaaattgaaaaagaagaaacttctcattttctgaaaaaaaagcttacgccgaaattttttatgtgatacggttatatctgttaacttttcagaaagaaggaatttaaaatgccaactaataaaaaagaaggtattatttttacaacattaatgtgtttctgcatggtacttggaatgagtatctataacttagttttacatgatagtctatcatggggtgctttgtctaccggtttaattccaggtttcatcgtcgcatttattctagatgtattcgttgtcggtgcaattgctaaaaaaatcgcatttagcttaccattgaacaaagaaaataaattagtcatgattctcacaatttcatgtttaatgattctcggcatggtcacatgtatgtcacttttcggaattctcatcgaaggtggtatccctgaccacttaggtagtgtctatcgtcacacatggttgatgaatgtcatcgtcgcattaccattacaactgatcatcgtgggacctttctcacgcgccattcttggtaaaatccaagcaaacgcagccgcaactgaaacagctgaataaaaacaaaaaaaaacgacgactagcttacgtagctagtcgtcgttttaattatgctaatattttttgaatagccgctaattcttcggccgtaaacgttaagttatctagtgcatgcacactgtcttgtaattgactcaagcgcgaagcaccaactaacacactggctacagtcggctgttgtaaattccacgcaagtgccatttcagccaatgattgcccacgttgttgcgcaattttgttcaattcttgaaccgtactgattgtttgatcaaccttttcaggtgataggaagggactatctggacgagctgcccgcgaatcggctggaatcccgtttaaataacgattggtcaataatccctgtgccaacggactaaacgtaattgcaccgataccttcatccgccaagacatccgttagtccatcttcaatccatcgatcgagcatgttataacgtggttgatgaataataaagggtgtcccgagcgctctgaaaaccttcgtaatcgctttggtttgttctgccgaataattcgaaatcccaatatatagcgcctttccttgttgcaccaataaatctagggcccgagctgtttcttcaattggcgtatctggatctggtcggtgatgatagaaaatatcgacgtaatctaactgaagtcgttttagtgactgatcacagctagcgataatattcttcttagaaccccactcaccatagggaccgggccacatataatagccagccttcgatgaaatgatcatttcatcgcgatagcgacgcagattatcatgtaaaatgcgcccaaagttttcctcggcgctgcccgctggtggcccctaattattcgccaaatcgaaatgagtgatgcccatatcgaacgcgccaaaaatcgtttccttttgagtcgccatcttatcggtttcaccaaagttatgccataaccctaatgaaatcgctggtaatttcaacccagaatgtccgacgcggttatattgcatcccttgataacgggtttctaatgcgtgatacatgtacaacgccttctctactcaagtattttgactatttagccgatcgtcttaattgcgtcttccactaatccccagaacttctgatgatcgagttttacagcgactgatgtgtgacagtctgttggaattgggaatctaaaatcggcgaccgtcatcccacgcgtcaatgttccattgagttcgatatcaacgggcactttcttagtggtcatcacacttggatcaatcacgtaagccacggcacatggatcatgaacgggcggtgcatcgaaattttgccccttcttgtacatatcgcggaaaaaggctaacaaatcaaccacgaactgagacgtttcagtatgaatgccttcaatttgttcaacaatatctggtgtcgctaacgcttgatgcgtcaaatccaaaccaaccattgtgacatcccagccggcattgaatacaatcttggccgcttctggatcaaatttaatgttaaattcggccactgcactcgcattcgcttcgtgataaccgccacccattagaacgacttctttaacgcgttcaacaatcttaggttctttgcgtaccgccattgcgatgttggtcaacgcacctgttggcactaatgtaattgtattagctggatgcgtcataattaaatcaatgattaaatcaactgcatgactttttccaagcgccaccgttggttctggaagaacaaccccgtcaaggccagtctccccatggatatcagctgctactttaatttcttcaattaatggtcgcgaacacccagcagcaatcggtacatcgtgcatgccgatcatggtcgcaactgcgagggcattgcgcgtcactttcgttaacgtctgattggcagccaccgttgtcactgccaacaaatcgatttctggattgccgtatgctaacatcattgcaacagcatcatcatggcctggatcacaatcaagaattattttctttgccattcgtaaaacctccactctctttcacttcgtgcatactatcactatagaatttaagcggtttcaagtcaaccatatataataaaattcaatcatgaaacggagtctattatgcgcattgatactggcgaataccctaccggcgaaaacgccgtccaccctaagaaagttaaacgtttaaaattacttagcaaggttgcaacaatcacctgtattacgatgtatgtttcatacatcccccaaattatcgctaatttttcagggtcacctgtctcacctttacagcccttagtcgcaacaattaatgggtgtctatggaccgcctatggctggaataaaacctataaagattggccggttattatttctaacatccctggcgttattttcggactcgttaccgtaataactgtttatattcactaaaattgtttgttaaagccacgatttgcgtcaaataatttttgataactaacagaaaagcaatccatcataagttgcttctctgttatttttttgtccctttacccaaacataaaaagccaaggtgattccttcttttatcgaaagaaaaccatcttggcttcactttgaagtaccgactatgggactagtcggccttaagcttgttattttgctgctcgtttaacgtatgtgccttcttgtgtgttgatttcaaggacttcgtcagcgctgatgaaatcagggacactaacgactaaaccagtttccatcgttgcaggtttacctgaaccagtcactgttgcgcctttaatcgaaggttgtgtttcaacgacccgtaagttaacagtagttggtaaagtaaccccgatcacttctgaaccgaagaattgaatcttgcagttcatgttttctaataagtattttaattcagcttcaatagcagctgtttgaatttcatattgttcgtaagtttcaagatccatgaagaatgccacgttatcttgtgtgtataagtattgaacatcttttgtatcaatcattgcttgttcaactttaacttctgggcgcattgttgtttcaacaattgagccagtccgtaagtcacgcaacttaacacgcataaccgtgtttcccttacccggtttatgatggttagcttctaaaactttgattaacttgccgtcttgttcaaacgtcattcctgctctgaggtttactgcttcaatcatgacttgatctcctttatttaaaaaaatattcatctctaactgtaccaaatgaaagccgtttaatccagccctcctgtggtagttatcctatttaatgtcgagtttatgaatcttatccgctggttgtggctcataatgttggtacatcttcgtaatggccaccttaggtaagcctgattcactaatataaatattaggtttgaggtatttcttattttgcacatcttttaagtgataatgttgaatcacttgtttctgatggccagtcggcgcttcatcttgaccatagaattgaatcttggctaatggtaagctaatcgttgcattattaatcttgaaataagcaacatctcgattgctgccaaggtacgtcatcttttgttgcttatcagcttgatagaattgctcgatttgcttcatgctgtgattatcgaccagccggacaatcggttgatcacctttgaaaaggtgtaagccatctagcgactggcgcacgttttgagcactcaacatcaaccagacaatcaccaacatactgataaagtacacaatatgtaagctaagactgctagcagcatgattcaaactaaaagtgtagctatcctctagctctttattcatgatttggcgccgaatgcgcattgcaataatcttatacgataggtaccacactacaagcgcgactaaggttgccccaaaagccgtcaaaattgtattttttagaatttctgaatccgtcaataatggactaaagccgctcacaagtttaattgtgagcgcgccaaggattagaatcacaaccatttgtagtacaaaaaaacgggtccgaatacttttgctaatcttcgtgggtgttaccactttcgtcttatctcccataccataaatcctcccttgttaacctacttaccattttagcataccgtttccatcaagttgattaaaagtccctcgttggcttattttttacaaaggcatctttcttcaaaggtagctgttcaatatgataaggtgaagttaatcaaacggaggtgtcgatatgttatatccagaaagtttaactcaattactcgccgattcaaatcagccagtcatctcgttattcattaacttagagactggcggacaagccattaatgcgaacaagattaagctcaatagtttttctaagcaaatccgtgaacagttaaccaccgactatcctgaagaaaaaaccttactcaaccaacttgaggacttactaagtaccgctccccaagaattagcacatatacagtcagttgcgttttacatcacagctgctggtcactacagccaaccccttcattatccgatcacgactgaatattttctaattgctgatcaacccgagctgcgtccactcagttcggaattaagtctgagtctgaacgggaccattctctgtctcaacaagactacttttagtttgaaatccattcaacaaaatgtcattcgggattatcctttacctaaagacgccccaacaaccattgaaattgggattggcacagagcgtaaaggcgaagtcgtccaaggcttctcaagtccaacccacagttttgttgtaaaagaaaatgaacaacttatcgatcaaactaactatttccgcgtgattggccgctatcttgatgacttgctgcctgaaaaagcaccgatttacgtggtcacattacccggcaacttaaatctcttcaaggaactcgtcgttaatccaaactaccggatggatcaagccatccaaacttcccctgattctctttcagatgacgacttactcgacaagttactcacaaatgcgcgtcatgaactccgacaaaaagcgctcggattagcagaacgggccgctagtgcgtatcacggcgattcaaaccttggtgatcctgagattattctttcacgcattaacaatcgccaactaacagcactcattatcccaactgcacttgcaccatcagcaacaatcagcgccgatcaaatcatggatcttaatcacatgatgattgcggccatccaaaccggcctgccattctacccagtaccagttgaaaatattccgacaggactggtggcgatgggaatttaactcttaaaacacgtgccaatgcagcaacgtatattcaagcgttgttgtactggtccgtgttttttgagttgcaaatacttgatctagataagctgccagttggtccgttggtaattcttcgtaataggcctccaaaaatggcctgtcgaaaacttcacttgtttgatattgaaaaatttgttgactaacttggtagcccgcatcttttaacacgttttccacagctgggatgatttccggtgtagtgttgggatcttgctgttcaatcccaaaataacgttcaagcggtgtgaacaagtcgtcctcgtttttagtgagccgtaagaatgcacaccactgacggctcttttcgctaatcgtcagtaatgcttgattggcttcgattgccggatttaacgccatccaaattaaatcatagcttttttgtggcgtttgcgccataaagtcagccacagactgctgttgataagcaatctgttggtctggtacatgctgtttagcttcttgttgtgcatactggagcatttgcgccgagatgtcgataatcgtataagcctgactgttttgcactagaggtggcaaataacggccgctaccaccacctaagtcagccactgtctcaacaggcagtaatcgccgatcctgtaaaaaagccacaacgtcagtgacaatcgacacctgtgactcttgttgaatctgatagtattccgctgcaaaatcatcccaaaaagctgcgacttcattatccacaatctatcctccgcttaaacttttattttctcagcttagcatataaaaaagatgccgacaaaataaattatcgacatctttttgaaacgtgctttttggttgcaccaacctccgcttaatctaaaatactcagttgctatccgcaaccgaacacacgcttttttaaacgtgctacaatcgccatattcttccgttgttaggctaatcctcagaatatctccggcgattttcgcactctttatctcactaccagcactgggattggtgcgtattttgccatgtaggcggcttggctgccgaagtatttagcaacgcccttttgtgatttcgaaccgacaattaacaaatcgggtttaaccttaggaatcacatcttcgataatcgcttcgcctggttcgccttctgcaattactgttcgcacatgattcacaccgcgcacataggcttgatcttgatattctcgtaggtggttttcaagatcctcatattggccgtggataaaatccttgttcaatgcttgatagacgttcatttcgtcattttccaataccgatacaatgactaattctaaatcctcacgtttagcccgctcaattgcataatcaaacgctaataacgcatcctctgagtcatcgaccccgactaaaattcgtttaatttctaaaactgacatgtgaccaacctccaattaattttcagttgctaattgctgttcaaaccgcttattgcctttatacaattcaataatcatccaaaccaataatgccatcacaccagcaatcaacacatatgcaatgcgatcagcagtagccaattgtgcagcacttgcgtgatcaccatagaaagcttcgatttgtcctggcaaccccatcatattcaaataggtcaagccaatgaccgataaccaacctaagcttttaatcaaccaactattcttgaagcgatcccccatctcaacccggctgtcggtaaacatcaacagtggcagcattgaaaatggtaaggcaaacgctaagaaaacttgggaattattcatcaaggtattgagcgcctcatgctcttccaaggctggtttattgctggtcatcatgacgcagattaataccggaatcaccgataacaagcgggttaccaaacgccgcaaccacaatggcattctcaagtgaatgaacccttccatgatgacttggccagttaacgtcccggtaatcgttgaattttgcccagaagcgagcaatgcaacggcaaacaaagttgataagattccggtccgggcaacacttgcaagaattccgttactcattgttgaggtatctgacaaagcttcaaataacccgaagaatgatggatctttaaccgttcccgttttaaaaactgcaacccccatgattaataacaacgcattaacgaaaaatgccatcgtgagttgaatgtttgaatcccaagtggcaaagagcactgtttgtgcaacctgtgcttcgttcttgcgatcaatcttccgtgtttgcgaaatcgcagagtgtaaatatagattatgtggcataacagttgccccgataatccctaaagcaccagtcaatggggttagtccaccaacagctggcccggtggcaaaggtcttagcagttggtactagcccaacaatcacccctgcccaatcaggatctgagagtgctacttcataagcaaaaaccacaaaaatcacgacaattaatgcgacaacgattgcttcaatcttacgaaaaccaattttcgttaagagtaataatagcatgacatctaaaatcgtaatgaatactgcaatcagcagtggaatcttaaataataagtacaaagcaattgccgccccaataacttcggcaatatcggttgccataatcgctaattctgtcaaaatccacaagacaatgcccaacggtttactcgtccgtgcgcgaattgcctgtgctaagtccatctgagttacaatgcctagtttagccgccatatattgtaataacatcgcgattaaactagacaccaaaatcacggacattaacaggtattgaaaactctgaccaccagtaatcgatgttgaccaattccctggatccatataacccactgccaccaatgcacccggtcctgaatacgctagtaacatcttccaaaagcctttgccctctggtacttcgaccgtcccattaatttcttcaagtgatgggccgttcgcatattcaatcagcttgtgcttcttgcccttttcttgttgattcattatcctcactccttattttgatcttgataacagttttattgtacgccgttttaatgaaatgtaaataaaaagttaggcaatgctaatttattttattcaaatcgataacaaatttattaatgcaagctacaaaaaaagcgccgtcgaaattattctcgacggcgctttacatactgctttaatcatccatttctttttcaattagcgcgccagtttcagcgtctaatttaacttgcattttttgctgtttttgatgaccttctacttcccagactgttcggccatcatctttttccaatgaccatttgatcacgttcccggtgaagtattgttgcgctttttgaagagcttgttgaggcgtcaacaattggtcaaacgctaattgcttttggtgtcgctcgacgccattttgttcatcggcatcaagggcttctttcgacaatcgactggttgcgccagttcgagcatccacatgcatgtgaagctcttcattgtcgttcattcccgttaattcataaaacatttggttaccccattgcttcagctcaacctcggttaaatctgatgcaggatattgttttgcgtacaattcacgggctttttcaagcgtcactttcggagcttgaaccgtttgttgcggactagtcgattctttttgagcggggggtgctgaatgttttgtttggttggctgtacaacccgtcaataggccgagcgttactaaactaacaatgattgttgttttgcgcatcctgttctacctcgctttgttttgatacttaaggataccattcaacagggtaaattaaaaagcaatatcccttcctagagcaatgttgtccccactttgaccaataaaccaagcccatacacgatgatgatgatggcactcactaagttgacgcccatcaagaattttggtgaaacttttttccggaaaaggctaaagataatggcgataccaaagaaccaggtcgcggttgccgaaacaacccccacgatgaatggaatcgcctcgctactcgtcatgccaccccgcaatgcgcccagcattaatgtcccatcaatcaaggcttgcggattaccccaaaccgccacaaatgcagtcaaaataaccttctccagtggcattggttctaacgcgccaaacgtaacggtactgcgggcactttttaaaatggtgtatccaatccataaaatcaaaagtccaccgattcccataatggctaaccgaaccgcatcgttttgcacaatcagtgcgccaatcccataaaacgccacgagtgaaaagagcgcatcaaataaccagatgaacaaactgttgaaaactgcccgccgtgttgtattcgacatggcattattaaaaacgaaaatattttgcatcccgattggtgcgacaaacgcaaatcccatcaagattccttttaaaaagaacatctattaacctccttggcaagttacctttcagcgtaacatatctaggctaaactttcttgtctggatttaattgtaaaatcagcatcgtcatcaacaagaataatgctgataaaatcaacgtccgttctcctaagaatgagacacatagtccgaccatcactgcaccaatcgtaaaactgataatgatgcgtaaaatttgccagcccttatcggctgccttacgatcatgtttaaaaacagcgtcataaaaactttccgccatcgtccgtacatttccagtcatcatcaatgatgtaaatgggccaccatccaattcacgaaattcctgtaattgcgcagccgcaatgattgaaacaagtgaacttgcaacaatatccggtacatacggtgaaattcccgcaacaatcgttaagaccaagacttcaatccccaagataatccgttgtcgtttgttaatcgattcgtctttttcaaaccgatgttgtaaaatgcgcgttaagattgttcccaacataaaggcgagaatcggggtaatgtgccgtaataatacggaccatttcatctgccccaaatgggttcctaataaaattagattccccgtttgtaatccggcgaagacttccccgtgcaccaaataagtgtaagaatcaaagccccccgcagctgccagtagcccgccatataataatttgtcgctcattgtcattttgttccgcattaattcatcctactcctcaactaaactataagtattaactctatcggaaaaaccactcgccgtctacaagtagttatcatttaaaacgttatcaaaaaaaggcctcagcaaactgattttgctaaggcctttttggcttaattttctacgtcaccattgaaaccggctaattgacttgaataaattgataaacgcgtcgcataactaggatggtcattattttccttgaccacttctttaagcgtcgataattgatcggtaataatgccgtcaacgcttgtaaataacatgcgttgcatcacatcctcatcattcaccgtccaagcatatactgtctgccctttgccgtgtgcttgacccacaaaatctgagtcgagcgtcgtcgcttccatcgtatagccattagccggcgtttgggggaatgtaatgttatacggcagaataaaactaacaaatagttggggtgctttttgtttaatttccgccacaatcagataacttaatgaatgaatccggttatgattcttcaaaagtcgtttttcgtatttatcgataaagtgttgcaccatctgtggactgtcttcattcgttgtcttaatttcaacgagtagtttttgatggtgcttttcggctgctgctagatattgatcaaaactagcaacctttgcagaatgaccattttcacggacagtcaatgccgttaattcagcaagtatcatgtcatggacgccgcgatcgacacccgccaagtgttttaaattatcgtcatgcatcacgacaaattgttgatccttggtttcatgcacatccatttcaacataatctggctcttcctgcgccgttttttcaagtgctggaatcgtattttgcacaccattaccatcatctaccccgcgatgcgaaatcaaggccggttgatcgtccaacattccctctaaatagacataattgtacaatgctaccccaccagccacgataacaattaaaccgattgtgccaatttggcggagaatcgtcaaattagtccgttttttcaccttagattggcgcacaaccgtcgccattgcgggaacttcaccatattggttcaatacaatctgtaagactagtaccaccgttaatgcgagtaaaatctgactgacgatttctaaaataaacagattcaaaatggctaaaaataaagcctggtgtggcaagtgttggtcgtaataccgttgactagcaaacaagattaagcggaagcccactccaacaattgctaccgacgttgttaatacaaagccttttagaaaaatacgccaagcctgatattgggtagcttgccaacagcgtttgagcgtggttcttagctgcgcctttggatgtgcaatcgtttctggtaaaaacgtgattaagcgaattgaaaggactaatgcactcgcgtagaccaagataatggggacccaaattttgggtgatgaccacatatcctgaataataaaatctggaacggtcaccttggataacaacgctgatttaaagaggacctgtccaaagggtaagattaataagaaatacagtaaaccaaccaacatcgtggttggccgtaaagcgactaatccccggactgtttccttaaaaatcatccagtatgtttcttgtgtttgcttttgaatatggcgcatactgcgcaacaagaacgtcatttgcagataaactgccgcgcaaatcaagaccagaatgattagtaagctaatcagtaaaagcggatgacgcatcatcaccggcaccagattggtgtaggttaaatacgtcacgccattgagtgccaccaaccgttctacaagccacgtaaacagcggtgccaccaagctgccaataattaaattcgtaatgacgagcagtaataaataaacactccaatgttgtctaaagagccgataattagcccttaaaaatgatgttaaacggcgcatataagttcctcccgaattgttacgttaaaattggtaataatgaaatcatcagataaatcatgctactaatgagaacaatcgcgacacttgtccaaaaattacggtgcttttgaaaatgatataaggccaataaactgccccaatcgagcagttcttgacttggaaccgcaagccacgataacgtgccaaatattaaaaaactgacaacgactgccggtaacaagcgcaagaaccaaccggatacccgtagactttgtaagattgtattcacaagctgaccagtcgtaataatcaccatcatgtacaaactaatgaataatatctgacaacaaaagaaccatgctaatgtcggccagacctggttctgataaatcaaggctgcgtaatcatttattagaccgacttcaagtgatttaagcagtacctgatacattaaaagggctccaacgattggaatgccacaaaggagtacaattgcaccgatagccccacgaatattgcgccaactaggaagcccaaatgaaccttcttgtgccagccataaaccatcaaaacgcgtcaaccaccatcctagcgcaatgactaacaccaagtaataagcaaagcttagaagacgtaaccaccacggttgtgcggctaactgcgcaaagtctaggttaaataattgcaacagtggttgattcgtattcaaaagcgttaacacaaagatcaaactcgcaaggattaatccccatgtgcgcttactgagcttttgcatcatcattttgctttgcctcctttaccagagtatcaatatcaaacgatacaacccgaccaatccgcgttttagcatttaatgcataggctttggcaccagattcaaaaaccgcatataaccgattgccatccaacgtaatctgctctaaatgagctggcatccgaatcttaagtagcgccttttctggcgtaaattgttggggccgcccagtcgttgcaaaaacgtaaatccatgaatcgtctaacccgtaggactgcgaaaaataagcccgcgtatcactaaaagttagcccttgaatcttatccactgcttgccaacgttgttcacttttaagttcattactgcggatattccgcgccgtcaatttaacaccagctttttcgcgtcctttaatgaccgctgaaacctgaaacgactggacgttactatccccgaaaatattgaaatagccgacccataatgccccatcgtgatagctaacaagtgaagctcgggtgatcgacttcaacaacgttgaatattggtattgaatcggcttttgcggctgatctgcagggtactggcgaatagttgttaacttaattgcaaatagctgtgcacgtgccttcttacggccacaaacccataagagatcatgttcaggatcataagtaattccaccaacgtgtggtcggccctttaaaataatattcttcaaatgtcggccagtccgcttatccataatggacagaattgagttgccttgccgttgatggtcataagccgaaacgatcacatagtccggcgtaactgttcccccttgaggtgtcatcatttctgctgtatatgctttgtaacctgccggcgtttttttcaacatctgcgcctggtctaaatctggcaccaagtaagttccagattgggttgcctttgcatactgtccaaaagaagccggcgttaacccttgatagtaacccaaatcccgttttagatgagggagtgtaaatcgcgcataaattacctgtctagattgcgtgattgcctgttcagtaaccgtcttagcaggaccgaaaataagccacaaagcagctgataacaaaagcaagcagccagttaataaaaaggttgttcgtttttccaaatgcatcatcttactccttatccgcaacaaaattagatacttgttgattccctcagtataccaaactctgaatttaatgtacccctttaacgaatgaacgaacaaaactattagatgcacacaaaaaaagcataaccaactaagtggttatgccttttttgtgatggctaatactttaactttccatttatctctagaatttcatcaatatggtttgcgtaccaatcttcatatgcctgaccgacaagtgctaatacctctctccctttgtcggtaaccgccaatgatacccgtcgctgatcatctggtgtcccaaattctttggttatcaaacctttccgataaagagtgttgatcttgcgtgacgttttaggagcgccaccaccaatttccttagcgagttgtcctggcgtaatcgcttgcttttcttcgattaactttaagattaaatggctgtcaaaactaacaccatattcttcaccaatttgattgagtttaaattgaatcgttttgattgcattgacccaatcaacaaatctgttaaatctttctttgctttatcttcagtcattttatattctcctactaaactctgttgccatcatttgtaaaaccaacatttactaataataaattagcttataattaagcaatattataattattattatctagttcatcgcgctattatcttttgtgcaagtcattatagtcttaatttcataaaaagtaaatattttttaaaaacttctacgacaatcaagattttcggcagtgattcatttacaatttaccaaaatccacatcaataaatacctttttatgactagagttactcagatgaccttctagatttgatttatattttgtttataaaattgattttattttataaaaaaaggcccgcatctaggatgcgggccttcaatcattaatgtctagttatggatataagtaaatgccccggcatttgaaattgtttgggtgttaggaccagcagggttgctgaagcccatcccaccttgagtgatggtaattgtcccagctgcggcatcgtatgattgaacgtaagcaacgtgaccatatgtcccatctgcggcccaagaacctaccatttggccaccagcaaagctaacgattgcgcctgctgctggtatatggttaactgtgaagccagctgctgcggctgaagcaccccattgagcgccattcccccagttattgccagcccaaggtgctactgacttaacataccatgtacattgaccccatgcatatgaattcccagctgaattaccagcaacttttccactgccaccgaaaacagatgtgccacccttattatctgatggcgtgtcaattgatgtaggttgaggtgtgtcttttttagcattgttggcattgttggcagcgtctgcagcctttttagcagcagcgtctgcttcttcagtacttgctttgtcgaagtctgcttgtaaagctgttaattcgtctttgttatcattgattttttgtgataaagctgtttgtttttgatcagcttcactcttcaatgattctaagtttgctttttgtttttctaaatcagtcttagtagcaactaaacttgctttagtattttcttgttctgtcttcaagccgcttaattttgccttagcgctgttaacatcatctaaagcttctttacttgcttggtttaatttattaattgtgaatgaacgcgaaactaaatctgaaaggtcatttgagtttaaaaggaagtcaacatatacgttcccgctgacagcatccccactcttttcttgtaaggtcactaattgtttcttcaatacgactgttcgtttagaaacttctttttgagcatccgtaatttgacctgaaagagattcgatttgattatttgctttagtaattgctgcttcttgatcagcaatttttgaagcgtttgttgaaatcttttgatccaacccaatcacttctatattagctgattcgatttgtttgagcaaatcgtttgttgcgttcttattagcagtaatcgcttcttgtgcttcacttgaagttgcagcagatactacgtttgttgaaagaactgaagctgttaataatccaagagcaattgtagtcgtaatcgtttttttaaatgacatggtttattttctcctattagttaagcccgaactctgagactaagtatatagggcgaatgttacattaacattacataaacattatgcttacttaacaaatcataaaatataggctttgtaagcgccttttacgactttagaagccgatttcagagaacccttccttattatttccttatcatatttaaaaagatgacgccgaattcattcagcgtcatctttttattagtcatttataaaagtcacttcttcatgctgcgtccaactatccaagcgcgcacttttcagttcaattgcgtagataatttcccgttcacgatcttctgctgataaactatccataaaccccgggacttgggcgttgtaataatcagctaattcatctaacttgtactgcgcgcgataaacacgcaaccggctgctagcaatcgtcattccttcgctagttggcattgtgtgaattgccgctaaaccacgatcgagttcttcaatcttaggggtatccggtgctgtcccaaaataccaaatattcggtgcatcatccaacacgataaaccgcatttggcggcttgaaggttgcccattttcatccgaagtactgagcatcatttcatttgtttgattaacgaacttctgaaatttgcgcaaatcattttgatgaatatgcggattagcgttttgtttatcaatatacgcgattacttcatcgatcgatgtaaactgtggttttgtatgtaaaaaatacaaaatctgtggaatcattcgcgaaatttcccgcttgtgataataaaattgtaaccaccgcttagacgccaacaatgcccctgcatactggacacgcaagcggttattatagtgtttgataaacaattgcattggattatagcgcaccaatttctgccaaatataaaaattgaagaatagtaaaatcacggtcatcaaaacattcacttgaataatattgatgacggataaattaccgtatcgtgcaaaagaagtgtataacacccaaaaaccagccgttgttaaaatagcagcgtacatcactaaacgttgcttaaacaaccgtcgcttatgcataataaccccaatcacgcgttggcggtttttcatatttcgctcacgaacaatcatgtcatcgacaattgcttgatcttttttagaaagcatcttcttcctcctcaaaataatcaaatctttgccgtaattcataggtgcccacatccgcgtaatctggaatgataatctgtggttgttcgtgccgcatgtctaatggaccatacttttgtaagtacatatcctctgctagatcgatgcgctgtctcaatcgcgtcggatcatacatccgcagcaaaccttttttcaaacgatattttcgtaatttattcaatagaaaaagccctaaaaagaagactgcaaatacggcaacgtataataaaaagtaataattagtctgtaataatatccttctaaaggccattaagtcaactggtagcggaacacttttgacagtatataagacccccgtaatggtcatcggtaccagacacattaaccatccaatggcaatcagaatcccctgccagatttttttgcccgtctttttcttagtaaaaaaccaatcattcgtcaacgatgcctcactcacttgatgcgtgatatagtctggtttagtcatcttgattgccctcctcttttgtcttagcgacgacctctaccgaacgttttggtgacttccaaacgccagcatcctcgcctttaagaatctgaataatcgttggtccgatttcaaccgccgcggtgaaagtattcaccatccaatagattaggatacaccatggcgcaaacgtaatatactttaatgatcgtccacggtcattaaagtaagacgccataatcaactgaattaagcccaccacaatctcaattgaaataaaaatcgctgcaaagcagaaattggtaattagacgtgaccaatccccttggaccaagcacaacacctgaacaccaacaaacgcaatcatacttaaccagaaaaatagcgaccaaataacacttaaactgtaatcaacaataatgggtaccattgccaaatgtttaatcgggtgtctaaagacatccatcgatttcgttaacaacacatgaatcccaccggcagtccaccgtctccgttgtttgaccaactcaggcagtgtttcaggcacatccataaaaaagcgaatatgtggtgcgaaatacgcttgccaaccatgcacctgcatatcccaagaaatagcgatatcctcagttggttgttccgcttgccaacccccaacatctaagaccgccgccttacgatacatggtattagcaccagaaaatgcaaatagaccaccgtatgaaagctgcgaacgtttaatcagtccgatgatcgagttcaattcattttgttgtgcttcagctaccaacgatgttttgttgattaataacatattgccagtaatggcccctaatcgatcgccaccttctcgttcgaaatagtgcatgtatttccacaatgcatccacttccggcttagaatcggcatcattcgataataaaaattggccttttgaaaatccgagtgcaatattaaacccagcggctttcccacgattattaatgatcgtaatcacacgtaagcgcttctcaccataccgagtctgcaaccgattcaaaatagcacctgtttgatcggttgaaccatcgttgaccacaatcacttcatactgattggttggataattcattcactcttcaaggtgttcaattgtcgattcaatcgaagcttcttcattatgcgcaggcactaaaatagtaatgaatggcgtccctttttctaagtaacgtggcatatctttgcgttctaaaaataaccagtaataaagactggaaacaatgaaagataatcccccgacgattggatacgacacaattgtgtagatgagtatccttgttatgtaatctgaaaaagccatgtagtcttcacccagtccttattgttgttcgattttaatagacgccaacttcatcacggacaatcaattgctctgcaaccaatacaataacacatcaggttcacattattaaatatatttatttgaaattttatcaattttaaaatgaaagcgtatattccacatcgagaattaattatattcttatttttggcgtacttaacgaatcgaagctttattttttgttgtaaatgcaacaaaaatattttatactatttttatcgaaatgaggtatgccatcatgactgaaattctccgcccaatcggggttatagcccgcgcgttggaatccattgctaatattgaattccaacaatatgatttaacccgcgggcaatacctttacttagtccgcattacagaacagcctgggatcattcaagaacgtctaggtgaattattaaaagtcgaccgcgcaacagtcacgcgcgccgttcaacaattaattaagcatggtttagttgaacgataccctgacaaaaccaatcgtaagatcaaacatctctatctcaccgaggccggtcgagccgtctatcccgccatcaaagctgaaaacgattattcaaatcaaatggcactgactggactgacgaccgacgaggcccataatcttgaagcactcctaaacaaagttagtgccaacgttgccgcaaactgggattttgtcaaaaagggacacgtccgacactattacaacaaaggaggcatcacaatgccaattcaagctgtcacattaaaccaactacctgacttacaatccatcagccgtgaaactttcacagcaacttttggcactgaaaatgcagcagaagatctcgctaactacttagaagaagcttataatacagaccgattaactagcgagctcgagaatcccgattcgttcttctattttatttatcaagatggcgaagtcgctggttatttaaagctcaacattgatggcgcacaaactgaaaaagctgccccggattcactggagattgaacgtatctatattcgacagtcctttaagcgacttggtttgggaacacaactaattaaccatgcactagccgtggcgcaacaattccataaaactaacgtatggctcggcgtgtgggaacacaacactgctgctcttaacttttacaaaaacctcggcttcagccaagttgatgatcacatcttccaactcggaagcgacgcacaacgtgatctgattatgcaaaaaacattaaccgtttaaacacacaaaaagaggcaacctatcaggttgcctcttttttcgattattgatgcgcacgttcatattctgtatcacagtcagctgtaaaaatggattctgttccggcttcaagtgcctttgtgtaataccattctttatgatctagcttcgtcaattctgcttgcagtgattcaatctcgttagccaacatttgccgccgttgttgaatcaacgccaagcgttggtccaaagtttcatcacctgcagttcgccaatcgatgtattgcttaatatcttttaactgcatacccttttttttcaaacattcaatatcacataaacagtctaaatcagcttgccggaattcacgccgaccagccggactgcgtttaataaacggtaataatccttgttcttcataataccgtagtgtcggaatactcaaatcatattgttgggcgactacgccaattgataatgccatattaaccttccttatacttgcttaaaaatcaacgtcatctggcaccatgcattgaccgcctaagttttccaaagcactaattcgggtcatttcactatctgttaattcaaaatcgaagatatcggtattttgcgccattcgttcttgatgagttgatttaggtaatggtaacacaccttgttgaatccccccaacgaaggcaaacttgcgctgccgttttgccgtgcttcgtcgcaattgttgcaatcgtttcattcgaaagcgcactggcttcaccaagtggtgcccaagcttcgactaagatgtcatgcgcttgattataacgcacagcttctgcttgtggccagcccggatggacttcgatttgatcaaccattggtttgataacggcggttttcatgagtgcatctaaatgatggggcataaagttcgacacaccaattgcacggatcttcccttcgttatatagatcttccattgcacgccaagtttcagcatttaattcagcatctttggcttcaaattgtttagtgttagctggccaatgaattaaatataaatctaaatagtcaacacctaacgttgcaattgtttgtgcaaaggcagctttcgtagcatcatagccccgttctgtattccatagcttacttgtcacaaagatgtcttcacgcgcgatatcactttctttcaaagcggcaccaacaccttgttcgttgccgtaaacggcagctgtatcaatatgccgatagccaactgataaagcttctaagaccgcttttttcgtttcttcatttggtgtttgatatgtcccataccctaatcctggaatggtaacaccgttgcttaaggtcattggggctgttaaggcagataatttttgcatttaaaagtctcctttttctaatcaataagactactttacaacctcaagctgacttgaggtcaaccattatttgggggcctatcactttttttaaatccgttagtgcttccctaggaattatgcctgactaataagagccttaaactaaacttaactattctgatttttagcggcctaatcccatcaataatcgtatcatgaccactgacaattcctatgtaagggttttatcttcctattttaggaattcgcggtataatatagatatcaaaagtagttaatggaaggaagcgagaaacatgaaaaaatttctattaggcagccttatttttgtaggtgttacagcaaccggtgcttgtttattagctaagaaaatggaactttttagagacgattctgtggattacgaaaaattcgaaagccgttagtcactcgtcatttctaaactgaatctaggaggtttttcatatgattaagaaaaaagcaattatgattggcgctggcctttctaacatggccgcagcagtctatttaattcaagaaggcggttggtctggcgatgcgattacattctattcattagatgaccatggttcaaacgatggggcatcagtttccgaaacaaccgatgaatattggaataaaaaccatcctctcgaaaatactaagggctacgttgcacgtggtgggcggatgcttaactatcggacttatgtcgatttaatggatcttctaggtcggattccttcagcaactgaacccaatatgacggctgaagaagatacccgttcattcgatgctcaacaccgcacattcgacaaagcacgtttattagaaggtagtaaaggtattttggatgctggtcatctcggctttaataataaggatcggttattaatgaccaaattgattatgatgcccgattctgaagaagaaaaattagacaacgtttcaattgccgaatacttcaaggacgatccacatatgttccaaacaaacttctggtacatgtgggaaaccacctttgctttcagaacccaaagttccgcacaagaattacgccgttacatgcaccaaatgatttatgaattcactcagattgaacacttagtcggtgttaaccggacacgttacaatcagtacgaaagtatcatgctgccgctgattaactacttaaaagcgcaaggttgtcacattatcctcaatcgacggattactgacttagactttaaagagactcagatgaccgatgaaattacggttactggtatgacaatgactaatactgagacagatgaagttgaacacgttacggtggacgacgacacagcggtcatcttcacaaacgggtcaattaccgattccgcaacacttggcgattataatacaccagcagctgaaaacatggattatggtgctgctgccggtctgtggaaacaagtcgcttctaaattctataatcttggcaatcccgataaattcttcgctgaccgcaatgccagtgagtgggtcagcttcactttaacgactaagaatcatattttgttaaacgaaatcgaacggattacaacgcaaattcctgggaatgctttgaattcgttcctatcaacgaaaccaatcacaccacttggtcaaaaagatgtgaatatgtcgattgttgttcaccatcaaccacacttcacaacgcaaaaaccaaacgaagcggttatctggggttacttcctctacccacgtcgtaacggtgaatttgtggataaaccttacatcgaaatgacgggtaaggaaatgcttcaagaattaattggccaactatcaaaagttgatcctggcccaatcaatattcgtgaaaaagaagctgaaattatggacagtgtcatcaataacattcctgtctatatgccatatgcttcagcactctttaataatcgtgccaaaactgagcgtccagaagtcatccccgaacattcaaccaacttagccttcactggtgaattcgttgaacaaccttatcagatgattttcactgaacaaagtgctgttcgttctggcgaaattgcagcttatcacttcgctggcattccaatggccaagttagtcgatacaccacgttatgatcgtgacatcaagacattgatgcgcgcaactaagaaaatgtttgcttaatccaaaaaagcgcggtagatttttacaaatctaccgcgctttttttctttaattcttgtcgaatcaatgtttcactcacataaaacttatggtataaattttctatacttttcgtgaatggtgcattgaatagacaacttaatataattacatttcgtctctcaactggcgagaatgcgacataatctttttcgtgagtttgcttcattatttgtaaataattctggtaatttaacaaatagcctcttccatgctccgattctactaaagtcattttataagtctcatttatcgatttaaccgacctgtaaatcgttttttgagatacggcaactacatcggccaattcatttgctgtcatgtaatctccattctttaacaaagcattcaatatctgattcatataaccagtcatattttcctccttatgtttatgatagcgctatttttattaaaaaaagataaacctttgcccgttgctacggtcattcttcttgtttttctttattctagtacatcttgtgtaatgtatacaaaaagccctaccgtattccggtagggcttttcgttgtgtggagttgctattaatattattttttggtacatccttagtgtagcaaaacctgggcagcattccagttacaagttcagcgaattgtccggaaagtgaacaatatcactaaattgtttagtcacttttaacgattttctcaagctgcttcaaattaaaacataaccgctcatcaatcacctccggttcggtctgcagattattttcaaaccaacaatctaattggcgaatgattgcaccgccgtaaaagtcttccaagtgatttaactgttgtggcgtgtattgtgctttgtaatggcgcaatgccttatgaataatctgtttcataacctgttcaaaaaagcggcggcgttccggataatccgctagatgatataaattcaagcaaaacatgcgataccgtgtaataaattgaatggcttcatgacagccggattcccaatcgccactcactatactctcatcaactttttgaataatttgttgttcaagtgtccaccaaaataagccgcacatgcccgttggaaaatgattataaaaggtcgttcgtgacaaattagccgtcttcaaaaaagtcgcgaccgtcaatttcgtcgctttttgatccattaataattcgattaaaatcattgccatatagcgcttagtcgcttgtcgtcgtgtcatttacccacccgttctaattactattgttattttaccaataaacaatcattaacggtaatattattaacaaagattaattttatagcaatgaaaacgttatctaattattatcgattgcacaaaaaaagcggtgcgaatttgatattcgcaccgccttaacacattaattatttttctaaaccttccgcaactgcttctgggtagttggctgtgacagttgcagcacaacgcgcacaaagcattgggaacttatcatctgaaccgatatcagtcttaatcatccgacaacgatcacaaacatccccctcagcatgcgcaacactaaccgaaatgccatcaaattgagtagcttctgttggaacatcggctgattgatccgcaattgttaattgtgagacaatcaataattgtttaacatcagcatccaatgaagctaataaagcagcattggcttcgtttggataaagtgttacggccgcttctaatgacttaccgatgaccttgtccatccgggctgtttcaagagcttttaagacatcgtcacggatccccatgaaggcattccaagtttcaactaagtcttcttcaccggcaaaatgttcaacttctggcatttcagctaattgaacgaattcttctggttcgtgtaagtagctccagatttcttcagctgtgtgtggcaagattggtgtcaataacttcgtcaaggctactgctactgcatagaaaacagtttgtatgttacgacgaggtgcatcattttgaccatcgatataaacaacgtctttggcgaagtctaagtagaaggctgataattcgttcgtcaagaacatgttaattgtcttataaactgtggcaaagtcgtaagcatcatacgccgctttacagctggcgatgattgcgtttaagcgcaccaacatgaacttatcaactgaacctaattctgcgtaatcaactgtatctttagcaggatcgaaatcagttgtgttcgcaatcatgaaccgcattgtgttccggatcttccggtaagcttcactgacttgttggaagttttccattgtgactttcacgtctgagctagcatcaactgaagcgacccagaggcgcacaatatccgcccccatttgtttgatgatcttttcaggcaagattgtgttcccaagtgatttactcatcttacgaccgttaccatctaagacaaagccttgtgaaataacagctttataagggctgacttcgccaactgcaacactggtaattaaacttgagttaaaccagccacgatattgatctgaaccttctaagattaagtccgctggataagttaagtcatcgcgagccgctaacacagcttgatgtgatgaacctgaatcaaaccagacatccatgatatctttttcttttgtaaattcaccatttggactcccaggatgtgtaaagcctgctggtaataagtctttagcatcccattcaaaccaaacgtttgaaccatgctctgcaaagagttgcgccacacgttcgattgtttctggcatgacgatttctgtgccgtcttcagcatagaagattggtaatggcacaccccatgcccgttgacgagagataacccaatcgccacgatcacgaatcatgttgtaaagacgggtctttccccattctggcatgaattcaactttttcgatttgtgctaagatttgatcgcggaacgcatcgattgaagcaaaccattgggctgttgcccggaagataacgggtttctttgtccgccagtcatgtgggtaactatgcgtgaagaagtcgagtttcaataatgaaccgttcttttcaagcgcttctgtcaccattgggttggctttatcgtaataaacgccttcaaaaccaggggcatcttcagtcataatccctttgctgtcaacgactgaaaggactggtaacttatatttagtgccagcgttataatcatcttcaccgtgacctggtgccgtatgcactaaaccagtcccagtttctaatgtcacgtggttgcctaagatcaccaatgattcacggtcatataatgggtggcgggctgtcattaattccatgtcagcacccttgaaagtcttcaagatttcaactgattcccaaccaagaagatcagtcatcttgttcaaacgttctgctgccacaacgtatttttggccgtcagctaacacttgaacgtaatcgaaagctgggttaaccgcaatccctaagttagcaggaattgtccatggggttgttgtccagatgatgaattttgtatccgcatctaataagtctttcccatccaccacgttaaacgccacgtacattgatggtgacttgatgtctttgtattcaatttcagcttccgctaaagttgattctgatgaaggtgaccagtaaacgggcttcttacctttatagatataaccttttttagccatttcaccgaagacccgaatttcttcagcttcaaaatcagctgttaaagtgatgtatgggttatcccaatcagcagaaatcccaagacgcttgaaatcttcgcgttgcttgttgacttgttccatggcatagtcgtaacaaagtttacgataatcaacgaggctcatttctttccgcttgataccctttttagccaaggcttgttcgattggcaaaccatgtgtatcccatccaggaacaaaaggtgcgcggaacccgttcattgatttgtaacgaacgataatatctttacttgttttatttaaggcgtgacccatgtggatgttgccgttcgcaaatggcgggccatcatgaagaacgaatgaaggtttaccttcatttaatttttgccgttgttgatagaggttgttatcggcccaacctttttgccaatcgatttcacgattcggtaaacctgctcgcattgggaaagctgtcttgcccaggtttaatgtttctttgatacgcatcaaatcactcctttatttttaaaaacaaaaaaagatcccgccctgaataggacgaaatcttcgtggtaccacctaaatttgaaggtcaatgaccttcctcaacatgcaataacgcgcattaagcgtcccaaattactcaattcatctggaatgaaataaggtgatacaccgctaaacagagcattaccaaccttccaccgtcgttggctcgcttaaatgatgttttgcttgctagtccttatttaaatctgttgcttggttttcaattgggttgtaagaatccgtaacagcttcaaccacttcatctgaatcggtgtcttcgactacatcggagagtacttcatcattgtcatcttcttcgactggtgtttcttcaccagggaaaataatggtttgcgttgttgtcacatcatcttcagcaatttgaccccaaggtttaacttctgcatccgagtttacttgatttgacccatggttgtcaaggtctgtcatatcaatttcagctgaaagagcttgatggtccgctaaatcatctttagctaataaatctgtccattcaggactcttaaccacttctaattgtgattcaagcataacttgtaatctttgacggaaaatccgtgtttgtttcttcaagtcatcggtttcgattgcaatttgttttgcacgttcagttgcatcgtcaatgatgtggtttgatttttcagttgcatcatccaacattgattttgcattcttttctgattcagtttgaatcatttcagcttcttttttagcgttatctttaacacggtcagccgcttcttgtgcaacaatgattgattggttcaacgcatctttcaattcattaaaatacgttactttttcatcgcttgattttaattccgcttttaaactttcattttctgttaaaactgattcgtagtctttaatcacttgatctaagaaatcattgacttgatccggattgtaaccccgcatttttgtgttaaattctttgttatgaatatctaaaggtgttaaaaccattttgaaattcctccatctttttcagcaattattttcttaaaatccccagtgtcactcgatatttttctttacgagtctgaccatcaatcgattggagttgaatccggccaaaaccacgaacagagacgatatctaatagtgctaattcaaaatctggtttatcaaatgcttgccaattcagtttaactttgttggcttgaattaattctttagcgcgttgtcgcgacagattgtaaacagttgaaatgatcgtatccaagcgaaacgagctgacagtcgtttgttcgaattgccaagcgtccttaggcgtcaacaactgtgtatagtcttgttcttgcaaatgaactgatacgcgaccaatcttagtgatttgctcttcgacatagcctgccatcttcttcgtcacaaagaattgccagcgttcttcatcggtcataatatccccaaaaacatcacggtcaatgccagcattcacaagcgtgccaagcaccttcccatgtgataggtttgcaaatttaatcgggtaccgaatctcaaataattgaatctcaaaatccgcatccgttggttcaaagtaatctggagcaatcattgcccgtttccgttcagcagcgttatatccgccattaaagtgataacggacgtcccctttttcaccgaccaaggtttgtaaaataaacgcttgacgcggatctaaaaacgccgttaagattggtcgatattcaacttgtgcttgctcaatccaatccaaaacctgcgcaacaaatggcgcctcgctttttctaaaatgttgatagacatctgcttgattgaccattgattacatccccactaataattgtgcgagtaagccgatcccacgttctactaaatataaaacgaaaaacgcagcaatggctgaaatcccaataccaccgattgcaggaatgaagcggtcaaagatttctaagaaaggttcaactaacttagcaacaaagcgccctaatttactgcccatcgcctctggaatccacgttaataaacaatagattacgacgatgccactataaatccgtaccacatacatgagcatcaagagcacataaaataaaaatagttgcacctagttcacctcaatatcaaaatcattttgatcgacaatatctgaaagattaccatcgatttcatagttcggtggcgtacataagaaaatctgatcaccaacccgttgaatttcaccgttgatggcaaaaactgcccctgttaggaaatcaacaattcgagtggcttgtgtcgcttcaattcgtgtgaagttaacaatcactgctttattttcaagtaaacttttgccgactttttttgcgtcggaataaatccgtggttcacataagacaattttattcattttagtagctcccgcagcttgcatcgagacgacgttattcgggcgaacacttggttcaccttcattagtgacagccgcagtttcttgcgtattagcatattcatcttcatctgacatgccgaaaaaattgctaagactaaacttaccagccatgagtcatcctccttagttattgcgacggcgcttgaaaaatggcggcacatcgtccccattttggttatcttgcttattatcatccgcttgggctgtccgtttgaagatatcgaaatctttcttttcaatttcatcaaatttttcagttgcttgcgcttgctcgcgggcacttggttcgcgacgcatatcccaatctacaaatggatcattattttgttctgatggtgttgaaggcgctgttgtctttggtgctgaattgtttgttgctggacgacgtttgttgttatcttcatcaatcccagttgcaataaccgttacaacaacttcatcaccaagattttcgttgattgaagtcccgaaaatcaagttaacatcgttagttgcagcttgttgcacgataccagcagcatcttgcgcttcaaacaatgacaagtctggtccacccgtgatgtttaagaggacttgttctgcaccatcgattgaaacttccaataatggtgatgaaatagccttcttcgttgcttcagctgtccggttttcacccgttgctgaaccaatccccatcaaggcagagccttggttagccataactgttttaacatcagcaaaatccaagttgacaaaccctggtgatgtaattaagtcagaaatcccttgaaccccttgacgtaaaacattatcggcttctttgaaggcttccatcattggtgtcttcttgtcaacaatttcgagtaaccggttattagcaatgatgaccattgtatcaacatgttgctttaattcagcaatccctgaagcggcgtttttaccacgtttagggccttcaaatgtaaatggacgagtaacaacccccaccgttagtgcgccaagatctttagcaattttggcaacaacaggggcagcgccagttccggtaccgccacccatgccggctgtgacaaagatcatgtcagcgccttttaaggcttcgttgaggacttcttcactctcttcagcagctttttggccgatttcagcagttgcgccggcaccgaggccgcgagtcaacttaggtcctaattggatctttgtttcagcttttgaatcttcaagtgcttgaacgtcagtgttagccgcaataaaatgaacgcctttaacgccttcgttgatcattctgttgacagcgttaccaccagcaccaccgacgccgattactttgatgattgcgccgctattttcttgtgctgcatctaatgaatattccatctgtttttcctcctgttacgactagcccttattcaaaaaagttactaaagaaatttttcaggccttcgaatgcattttttgattgatttttaggtttggttttcttacttggtacttctttggttgttgcttgagatttcattgttgatttcgtcactgtttggtctaattcagtctgtgctacattcccaagtgcgccttggaccaaccaatcaacttccgacaagttagctatgtagttaattaaactcaacccttgggcaaatgatgggtgccgcaagcccatttgatctggaatgtataacttcactgggcaattaaagatttccttagccaagtcgacaatcccaggtaaagctgtcacgccaccggtcataatcaccccaccaggcatatcaaaagcgtgtactttatccaattcagctttcaaacgatcaaaaatctgcatcgtccgtgcttcaataatctcagctaattttttctctgtcacttgcactggtaaggcttgaccaacaacttcaattggaatttgttcttcttctgaagcagccaatgaatcagcattgccataatctcgtttagctttttcagcattttcaattgacgtgttcaagaccacggaaatatccttggtcatatggtcgccaccttcttgatcaatcgccgtaaattttaattgatgatcatgaatcacagcagctgtactttgaccaccgccaaggtcgacaacgattgccccaaaatcttgttccccgtctgataaggctagcttaccaagtgctaatgggttcactacgagttgtgatagtgttaaacccgctttttcaatacatttctttaaattatgaatcattgtcttgggtgcggtgaacaaaattccgttcatctcaagccgaacccccatcattccgcgtggatctttaatcccatcaaacccatcaaccgtaaacgattgcggtaagatattgaggatttcacgttcaggtggtaaattccgaaccaatgcggcactagcaacgtcttgcacatcttgaccagtaatttccttagattgatcagagaccgcaatcatcccttggcattcttcgatttgtagttggttggctggaattccagcaacaacccgattaatttcaatatttgctttttgttctgcttgttgtacggcttgttggatagcggtaaccgcttgatcaatgtccacaatcgtcccgcgacttaatccgtttgatctagctgatccgacgccaatcacgttaagttgtttattaattgattctgcaacaattaccttaattgaagtagttccgacatcaagaccgacatatatttttgaattctccattaagtgtgtggaacctccttgcattcaattagaataaaatgattcctatgctaaatagtaccacatttcgactagatttagaaagccaatccaatctttttaaacagtgttaactaattttttgttgaatcggcctcagaattatcaaataatttggcgtaagcgccaacttctaagtcaattcgtcccttaccgtccatttgtttcgccagtgtgggataatatttaattttcttggcaagtgtccgcaaatccccaacaacctcattaccatcattcatatataagtgaacttgataaggattattgttcttagctgttaaacgaatttccgacacagcactttgaatgctgtttggaaaagcttgatatagttttaacccttgctttaagaaggcgtcatttttaaattgactatagacagggctattgccgagagactgcgtcattttcgtctttaaaatcgtgccattttctaagattggataatattgtttatgccgcactagatagcccaccgtaggatattccttaatcgccaatgtcagttgattaaactgatcaactttgacatttacgcttttcaccttaggtagtttctggtgaatccgcttctcaatcgctttttcctgccagatttgtgtcaggacgttattgccaatccgtacgccactcgcattaatcacctgttgatcaggcactgatttagtcccgttgaccgtcatttgttgaacgtcgctaatcggcaacataaaatagattgccacacaagcgcccaatgtgaaagtgctcaataacgctgtcaaccgccactttgtctttgccgttcgttgcgcttttagatgtggtagttgaccactaattgttggtcgcccaggcgttaaccgttgccgacgttgtttcttccaacgctttagttgataagcgcgccaaacgtttagtaattggagcggatcgagcgacccatttttagttgtttttttcttcaagtcatccgcccccttcttaacttagatgatagtattaatcacttcaataatgcgatctgaagcgtctggaatccccattttcttagctgctttagccatggcttgttgactatcaggggttgccaaaagcgtatctaatgactgaactaatttgtcacccgttaattgtgcttctggaattaaaatcgctgcgtcttctttaaccaaactctcggcattttttgtttgatgatcatttgttacataggggcttggaatcaaaattgacggaatcccaagtgctgtgatttccgccaaactcgtcgcaccagcacgaccaacaatggcctttaaatctggtaaaatttcaggcatgtcgttgatatatggtacaacagccaaattatcgttgagcgtcatcgtctttaattgtgcttgaacatcatcaaaatgaacccgtccagaaacgaatagcacctgatactctcttgtattaagtgctggtactgcatcgataaaagcttggttaatacttggtgcaccacggctcccaccaaacacaagcactgtcggactgtcagtcttaagcccgaattcacttaaacgttcgtttggtaacattccagcaacttgttgggcccgcggattacctgttaatacaattttgtgcattgggaattggtcgctgactgattcaaaggaaatggcaactttatcgacaaagcgcgccaaaaagcggttggtaaccccggctgctgagttttgttcatgaatcaacgttggcacttttaagcgacttgctgcatacagcaatgccccagaaacatagccacccgttccaatcacaatatcaggtttgaatgttttaatcatttcttttgcctctttaacactgcgcaagaaaagttgaattgttttaatattcgttttaatgcccttcatattcatcgaacgtttaaatccttggatttctaacgtcttaaaatcgatgccttgatctggcacaattttactttccaaaccgcgtttagtcccaacatataaaacggcatccaacaagtcgcgttgttgcattctttcaattagggctaacgctggatagatgtggccaccagttccgccaccagatatcattactctcattttagaatctccaatttaatctgtaatttgttcgactgccttaataaagacgtctccacgttcttcaaacgtcttgaactgatcccagctcgcacatgcaggcgacaataaaaccacgtcgccggcttcactagcagcataagcttcaggcactgcttttgttaaattatcaactattttgatgacgggaatacctacttcacgtgctgtctgtgccaacaattgtttggtttcaccatataagatgattgcttttacgtgttcttttagtagtggtaataatggttcgaaagtaaagccccggtcaagaccacccgctaataaaacaattggttgtttaaaactcttcaacgcgacttcggtagcttccatattggttgctttagagtcgttatagaagcggcgaccttcatagctcgtcacaaactgcatccggtgtttaacaccggtaaaggtcgttaaaacatcaatgatcgcatcgtttgattggtccatcaacttagccgccgcaattgcggccaaagcattttcaatattatggtcaccagggacgttaatatcagtcactggcattatcacttcacccttaaaacaaagttggccatctttgacataggcgccagcttcagagttgcctagccgtgaaaatggcacaacttgcgccttagtttggcgactcaattcacgtagttcaggtaagtcccagttgacaacaaaaaagtcgtcagccgtttggttttgaataagtcgcattttcgcagccacgtaattcgcacgcgagccatgatagtccaaatgtgcttcataaatattcgttaaaactgcaatcttaggtttaacggttgttgtaccgagtagttggaaacttgataattctgtgaccatcacatcggcagccgtcactttttgggcgaccgcacttagtggaatgccgatattgcccgcagcgtatgcgtgcccctgggtgcgattttcatctaacatcaacgtaattaacgttgtggtagtcgtcttcccgtttgaaccagtcacactgacccattgggcttcagacacttcgtacgcaagttctggttccgttaaaactggaatcttacgcgcaatcgcttctgccaccattgggttatcgtaacgaatgcccggatttttgaagaggtatgcaaagttgcgctcaaataacgccaatggatgcgatccagtaatgacggttgcccctaattcacgcaattgtgcaacttgaggattgtcttcttgttcctttccgtcattgacggtcacaatcgcccctaattttaataacaatttagcagcattaaagccgctcttccctaatcccaaaactaaaactgcctgatcttgatacgtcgtgctggccttcattaaattcgccctcttctaaaaaattaacagataaattgctgaacagatgatactaaataaccaaaagctgatatcaatccgccattcactccaccctgacatttcgaagtgatgatgaatgggactcattttaaaaatccgcttatggaataacttaaatgaaccgacttgtaacatcacacttgctgtttcaatgacgtatactaacccgaccaatagcagtgagaactctcgatgtaataaaattgacatggctgctagtgcgccaccaagtgctagtgaaccaacatcacccatgaaaatttgcgctggttttttattgtagattaaaaagccaagcaatccgccaataatgctgaggccgaaaatggcgacatcaatttggttttgatgaaaggcgataattgtataagttgcaaatgagatggttgccaagccagcaactaacccatcaatgccatccgttaagttcaccgcatttgagaaaccgactaaccacactaagacgaatacacaaaagaaccagttacttgaaatagtgccaattactgggatttcaagtgcagtactgaagccttcatggaaataaacagcgatgaagacaatcccaccaataatttgccctaacaatttttgccaagcgcgtaagcctaagttctgtttacggaaaactttaataaaatcatctgaaaaaccgagaataccgtataacaccagaataaacatggcaattaatagactattcgttaactgttttaagaataatcctacccaaatacttgaaacaacagcggcaataatgaataagagcccgcccattgttggtgtcccatttttcttagcgtgccatttggggccttcttcacggattgtctgcccctcttttttaaagcgtaaatacccgataaaaagcggcataaaaatcaccgtaattacaaacccactcattaagggcactaaaaattgtcctgctgccatttcataaactcctttaatccaactatcttattttaattgtacttttatttttttaaccccatctagcaacccattgaccgctaggctttgatgataagcatatccgctacctttgatgtcaatctcaacacctgttaattgcgcgagcttcaagaggtcatttttcgaccaacccgtgacatctggcatcgtcattgccccattggtcattaaaatgactcgctgtttaggtaaaatcacactattggcctttggtaattgctggacgactaagttcccactaccaacagaagcggtttgtaggcctaaatccgttaatttcttttgtgcttcatccgttgattgaccaatcacagacggaactgttacttgttgttgtgtgtctttttcagcctttttggtatactccagtgcccgtttcatcattggattgaagacctgtgccaaaatactttcagcactatctgtcatattctgcggctgtttcattgtgacatataaaatatacttaggatcatcagctggtgcaatccctgatacagagaagatataattgcttgcgccggttaaatagccaccgtctagaccagtaatttgtgcggtcccggttttaacggctactttataatctggaatttggtaaacctgacccgtcccataatcttgataaacaacatcttccatattttgtaagacagatttggccgtgctagccttaattggtttaccagctttgattggttttacttgatgatcctgattaatcccagataaaatctgcggtctaatcattgtgccatcgttcgcaatcgcacttgtcatctgaagcatctgcattacattaacgttaatcccttgaccaaatgaagttgtggcctgatctagtggccgaacatattgcaatgtcccctctgtttcgccgggtaattgaataccagttggttttaagaagccaaacttctgaatgtagtctttccaaaccttaggacccatggcttgttcaagcttgaccatcccaacgttacttgatcgtgcaaaggcttgactcagcggaatcatcccccagccactcgtttgccaatcgctaattttcttatcgccaactccaatcgaaccggattgataatactgattaggattgtaattaccagagtcgatggcagctgccaaggttgcaattttcaaaacagagcctggttcatagccatcttcaactaatgtatctcgccaaatcttgccaattccctttttagtgctggcattaaaggttggtcgttgtgaagccgccaaaatttcacccgttttagcattcatcaagacggcattcatactcttaggcttatattttttattgacgctcgttaataaagtttccatgtatgattgtaaccgagaatctaaggtcaagtaaatatcttggccgtttttagcggcttttactttgtttttcttttgattgatcgtgtatccataggaatcacgggcaaaattcttgtaaccatcttggcctgctaattgtttgttgaagtatttttcaatccccattacaccaacgaggctttgatcagcgccgtcttcgtcctttggtgattgagcgataccaatgacgtgagatgcgaatgttccattagggtacagccgcgtaggggactcattgaagtaaataccggttaaatgttctttttcaatcttccgtttgatgctcagtgaaaggttttggccggcacttccgaattcaacttgataaactgaacggttagctggcgttaattgtttatagattttttcttcactcaatggtagatagcgactcaaaactttcgctgtttttttcttatcagttacatataacggcttcttattaggaccaacgtaatcgtgacttaataccgcatacactgaataggcgttaatatcttgtgccaaaacgttccctaaagaatcataaattgtaccgcgttgtgcgcgaatcacggaatcagctttgtattttttctgtgatcgtttcgttaaatccacccctgcaatatgcccagtagcagcaatgtaagcaaaacgaccggcgaaaactagaaaaatcgccgcgataattagcaataaaagcctgccaaaaacgcgtcgattccgccgtggactcttacgtgtcttaactgatttcatttagacacgttccgaatattattttcatttagtttaagatcatgtttctgggcaaaagcattcagacggtcagagcttgttaattcaccgatctcctgttttaaatcattattgttagcgctgacttgggccatcttttgagtcgtactttctaatcctcgttgtgcattaacaactgcaattttggtggttaacaaactaaccaacatcgcgaaaaagataattccaataactgacgtcgctaatttttcaacagctgaaaaagccacttttttagactggcttgcaactgcttgtttatgtgcagtaggctgcgtttttagcggtgctactggcgtttctaattggcgtgccgtgttagttgccatcatcatcaatccttctagtcaatttctttttgtttttctgcgacacgtagcttagcgctatgtgcacgatggttttcttctaattcatcatctgttggtagaatcggcttgcggttcactaattttagaaccgttttttgttcttctggtaaaattggtaaccctttcggtaaatctgggagcgttgcttgttccttaaacatcgtcttcaccaaacgatcttctaatgattggaacgtaatgacactgatccgcccgccgacattgaccaatggaatagcttgttcgagtgaatcttcaattgcccctaattcatcattgaccgcaatccgaatcgcttggaaaatccgcttcgctggatgtccaccctttcgtcttgctggtgcaggaattgcttctttaatcaaatcagctaattcgattgtcgtttcaatcggcgcaactgctctttgttgttcaatcttccgcgcaacttgttttgagaacttttcttcgccgtagcggaaaaagatcttaattagttgttgataggtccactcattaacgacattgtaggcactgagttccgccccttggtccattcgcatatcaagtggggcttctttcttataactaaacccgcgttgggcatcatcaaattgtggtgatgatacgcctaaatcgtataaaataccatcaatcttagtcacaccgtgttctgctaacgctgcttttaaatagcggaagttactcttaataaaagtcacttggcccgcttcagcatatttggctaatcgttgtttactacttgctaaggcatgatcgtcttggtcaaacgaataaagatgaccggtcgtcagctgagataacaaatattcactatggccgccgccccctaatgttgcgtctacatacacgccatcgggttgcacattcaaggcatcaaccgtttctttcaataaaacactttgatgtttaaatgtttctgtcatctatttaccatccttctaaaaatcaaaatctaacatattttctgcaatatcatcaaaattctcttcagcttcttcgctaaagctcgcccatttttcctggctccaaatttcaatgcggtttgagaccccgattaacacacattctttttcaagaccagcatgtttagcaagtgtgtctgggatattcacccgaccttgcttatcaggggaacattcgaccgccgctgagtagaaaaagcggacgaacgcgcgggcatcttttttagcgaggggcagtttttttaacttctcttccaactgttcccattcactaagggggtaaccaaaaatacaattgtccatgccacgggtgagtacaaattccgcacctaatgattcacgaaatttagccggcatgattaaccgacctttcgtatcaatcgtgtgatgaaattcgcccatgaacataaccattcacccctttgcccaccttaactgattttagtctaccacaatcccccactttctaccacattttgccaaaaaaaaccaaaatcttatcattttggaaccaattgtgcacgatatttatattactagcctttttgaccaaaaaaacagccatttcgttaaccgaaatggccgtttcacttgttaattaagtaagcttattttgggctgtcgcaccacttctaagcaacgccgcaaaaaattgctcactttaatctaatttttagaagtttaaaatgccagttgcagcgagtgaaccaaaaacgactgagcccactgtggcgattaacattacccaaacgaaaattttagtaatgcgactaaacgtgcttgtttgtttcttcaattattccaccacctagacttttttcttatcagcagtttacaccgaatcacttgaaagtgcaactcagtcctttttatcttttccaaaagacggtacaatgggactattaactttcgaggtgatttaaatgccatttagcacaacacttttctttgcaggcttaccgcccgtctgtgtcgcactcggctactgtatcgaccggttgactcagcgtctatttaaacatcgttttcattatattaattggctaccaattccattgctagtaagtgctatctttctgagtatgccaattttcagtaaagctggctggttcttttgcttagctatctgtctgtggggaatcatctggagcttaacgcgcttttactacgaccgtgcgctgtacctacgtaagtttctacggagttggtggcgctttgtcctcgtgatggccacagcatggtacctatcctttctaatcatcacactcctttaaaccaaaaaagcggtgtcgactctttcaatttgtcgacaccgcttttcttagtttaaaaaatattttcctaacgcgcttaattgcgtaattgtgattgtcggttgcaccatgattggtaatcgatcaacatcaaaataggccgtcgccacatgggcgttaatccctgcttcaatatctaatgcacgatcaccaatcatcacggttttagttttatccagctgataacgatcacataaattgttcaaactatctggcgccggtttcctggcaaatccgctctgactcgtaacaatttcagtaaaataatccgctagtccatgcgctgccaaaaatttttctgcagcatcatcccgatgggtcaataagaaattctgaccatgtgcactaatctgtttcaaaatcgccgctgcccccggataaggttgtggcgtctgttgtaattggtgttctaattcatgatattctcgatccaattgttcaaatgaaacattagtttgctgagcaagcatctgcagttcccgtttaattgaagtctgcttaatcgcttggtataagtgcgattgatcgactgcgacttgatgatcacggtaaacctgactgagcgccgtcatcataacaggataagtatcatacaatgtaccatcgaaatcccaaatcgcattttgataactcattaattatccattctcctttgtatcaaataggatagtgactggaccgtcattgaccaaagccacctgcatatcggctccaaattctccagttgcgacgcgaatcccagtcgctgctaatttttgattaaactgttcgtataagcgtttagcatagtccggtttcccagccgcagtaaagcttgggcgattgcccttcttagtgctagcaaaaagggtgaattgtgacaccgataaaatggcaccgtcaacctgggccaacgccaaattcatcttgccatctgggtcttcaaaaacgcgcaattgactaattttcttaaccaagtaatctaaatcagcttcagtatcatcatcacaaataccgaccaataacaaaaagccttggttaatcttaccaacaatcgtctgatcaatcgtgacacttgcttggctcactcgctgtaatactactcgcatattaagtcgctcctatccttgaacccgtttgacttcgtaaacatctgggatgttcttcacggcttccataatcgtttctaaatgatctgtattgcgaatgccgactgtcacatgaatatccgccatcttatcgtgatcaatccgccccatcacgttatttagctgtttcgtatgtgcatttaaggactgtaagacatcgttcaatagtccaccacggttatagccgtagatttccaaattcgcatcatagagttgatcattcttagcgttggtattttcccaactgacttcagtcaatcgactgttcatatctgcccgatcaacgatattcggacaatcgcgccgatgaacagaaaccccacgtccctttgttacatagccaacgatatcatcaccagggactggattacagcatttactcaagtgcactaagacattgtcgacaccttcaataacaacaccgtcttcatgtttgattgtgatatggctaccatttgctttaggccctggttgttgtgaatccttcgctgatagaatctcagcttctaatgctttttgttcactttcttcttttgcccgtcgttctttaatcgttaagcgattgacgactgactgtggtgagatttcaccgaacccaattgctgcaaacagttcttcttcggcattaaaattaaaatgcggtaggatgacagctatctcggctttagtgaggtgttcttttggtgtataaccatcttctaccaacagatgttcaacagccgtccgtcctttttcgacgttttcatcccgatcttcttttttaaagtagcgcttaaccttattccgagcacgcgcagtgaaggcgagcttaatccaatcacgacttggtgttgcacttgttgacgtcaacatctcgacaatatcaccattacgtaattgatagttcaacggtacaattttgccgttaatcttagccccaacagcgtggttcccgacctcagtatgcactaaataagcaaaatccagtggcactgaaccctttggtagttcataaacatcgcctttgggtgtgaaaacataaacgcgatcgctaaagatatcgcctttgacactttccataaattctgcagcatcatcggaagcatcttgaatttcaagaatttcacggaataaatcgagtttacgccctgattcatccagcttaatctgttccttaacgccttctttatacgcccaatgtgcagcgaccccatattcagcaacatcgtgcatttcttgcgtccgaatttgcacttcaagcggtttgcctttgggaccaatcacagttgtatggatcgattgatacatgttggcctttggcattgcaatgtagtctttaaaccgaccgggcatcggtttccacttagtatggattgctcctaaaacagcatagcagtccttgattgagtcaacaacaacccgaattgcgagtaaatcatacaattcttcaaattgtttatgctggtcgcgcatcttgcgataaatcgaataaagatgctttggtcgtccataaatgtcgtaattcatatctaaatcagcaattgagtctttaatgtcttcaattgcttcttgaatataagattcgcgttgtgtccgcttagaattcatcaggtgcacaatccgatagtactgttgtgggttcaaataacggagcgagatatcttccaattcccacttaatcttactaatccctaaccggtcagccaatggtgcatagatttctaatgtttcgttagcaattcggcgttgtttttcgggtttcaaatgtttcaacgtccgcatattatgcaagcgatcagcgagtttgaccataatcacccgcaagtctttagccattgctaataacatcttccggtgattttcagccagttgttcttggtgtgatttatatttaatttttcctaatttcgtgacaccatcaacgattaccgcaacatctttgccaaacatctcttcaacatcacctaacgtgatattcgtatcttcgacaacatcgtgtaagtaaccagaagcaaccgtagcgggatccatcttcaattcagcaagaatccctgcaacttgaattggatgaataatatacggttcacctgattggcgaacttgttctttatgcacataagctgcaaaatcatacgctttttggacaaaagcaagatgctcagtattcatgtatttctgacataactgtagcacttcctgctgtgaaattactttttcttctggcatcctgcctcactccaattcctcttactcgattaaaaatgtactgaatacaacaaaactgactcaactaattaactgtcgagtcagtttgcttaacggcgttcatacgcagtattaattcctaagtaacttaataaacaataaataggaacgaaccaatagttataatctgcgtagcgcacaaccaccatcaatccaaataaaatcggcaggtacaaaatgtgataccaagctgcatgggtcttttgaacacgatacccaatcataaaggctgcgcaaccattgacagccatgaatagcagtccaatccgccacgttttatcgatgtgcaagacaccaaacactagcggtaaaacgaccgccaagagaatggccactaataaatagcgtacccaatccatttttaaataacgattattcataaatttagtcatgttgtgcccctctgtaaaaagattacatctatcatactataaagtagccaattctgtcacatacgaaatcgcacttaacagatataacggcgcggtctcggcccgtaaaatccgtggtcctaaaccagccatcttaaagccagccgccgcaagcatctcaatttccttgggcgcaacgccgccttctggaccaaaaacacaaagtaatcgatccccaggttgggctgtttgtaagctctgaactaattgggcatgctcaccgtctttagctgactcttcgtaagccactaatttaatcgtcgctgattcttgtgcgaccgccgttaaactgttgcgccattcaatagttggtacatgcgtccggtgagcttgttcggctgcttcttgcgcaattttttgaagccgcgcaactttcttagcttgttttttatcatcccagcgtgcgactgagaattggctattacagaaaataaaccggtgtgcacccaactgcgtgcctttttgaacaatccagtctgttttgtcaccctttgacaagccgcatacaatcgtcgtctcaatcggtaattcaactgattttgtaattggcgattgcaccgtaacggtgactgttttgtcagttgcatccagttcagttaattcaccgatgaatgcttgttcatccggcgttaccaattcaacacgatgaccaggctgcatccgcatcacttttagcatatgatgtgcagtttcacccgttaaggtcacttgttgttctacttgaattgcttcatcaataaaataacgttgcatgccatactcctcttaatcgtcgtccgtcttttggcgtgtaatcaatgccacccagtcacccatatgaagggcttcttgaacaacaaaatcattcgccgctaacgtttcacggacaagtgcttctttatctgcaataatgccggccagtaataggtgtccattgtcattcaataaagccttggcttggggaatcaagggcacgataatctctgctaaaatattggccacaatcacatccgctttcgttgtaatcccgttcaacaaatcgttgggatgggcatcaatgccagcggtcactgggttgagggcaaaattttccttagcggcatcaaccgcaacttgatccacatcataggcgcgaatatcattgactcctaaatgcgcagccgcaatactcaaaaccccagaaccagtcccgacgtcaattaaagattcaccgccgcgtaaaaccatttctaacatttgtacggatagatgggttgttggatgcgttcctgttccaaaagccatccccggatccatccgaatcagtgcttcgcgttcatcagtcggttgatagtcggtccaacttggcacaaccgttaaaaagcgagttagccgcgttggttgataatatttcttccaagctgtcgcccaatcatcatcggcgacttgtgccaatgtcactttaccagaaccaatcgctaacccaaagtcagtcaattgggcaacgcgttgttcaatcaacggtaatttttccggcacaaaaactgtttctgggaaaaaggcactcactgcagcacccgtttcaaggtggggaatactgtctagatcaataatttgatctggctttgcctttaaatgttcataatcggctgcgtcttcgatttggattccttccgcaccattttccgttaaaatattggcgattgcttccactgcttcattaacagtagcgaccgttacttttgtccattccatgtagcatgtctccttcttaatgcgggttgcttagtatttagggtaagcgtagtattttttcgctaattgatcatctgcttgagcgacagttgcttggaaaacagtgtcatcccagtttaagataaaggtttcttcgtctgattcatcattcacaaaagcggctaattgatcttcgccttcatctaataagtcttgtaaatagttgaaaaagccccgaccgacttgtgcgtttaaccccttgcgaccagcaaatggaatcactgctaaataattgtctgcatattcaaagccgtccatcttactttcatcgaagaataaaatcgcatcttcataactgatttcatccgattcgttcaattcaccattttgatcttcaacggcaattgcttgttccttagtcacgtttaatgtgaattccaattcaatcgcccgagcttgtttgtcccagttgatattcatatccccactaaattgtaaatcatctaattctgcatcgaaaaatgctaacatatccatttcagccactgtattcaccatatccttttaattagtcgttatttaagtcaattttaaagttgaacgtattaacatcatacctgattatgacttgaatctaaagcaatcattcaaaaaagcccagaacaaaatgtcccagactttcaatcgtaattctacttaatgtgctgcttggttctgaccccaataaataacgtccatactctgatcgtcataacgttggaactcaattccgagtgctgcatcagattctgccatcacacgaccatatagccgcatatcagcttctggcgtgttgccatctgggcgaatggcatgcatcaacataaacttagccatttctgattgtagatgggcttcaatcggggccaacggatcaaaaaccatcgtgacaaaccgaatatcactactatcgccatcaccaattaattcaacaatcggaaacccaccaaaattttgttgttgttttaaataagccaataactggtcaatctgttcttttgtgaaggctgatttataaaagaggaaatgccaagtttgtcgtttcatcgtgtcacccacccgttatttattacatatagtatgccatactgtcaccaacaacgcgaacttagtctttttttggtaattgattcgattttggttggtgatatgcctttttcaagccagcaaatgtcgcttgaatcttttggtaatgcatttcatcgttacgcgcatgcttcaccaactgggtaaaatcgtgggactgtaagtccttttctgtttgttttttaaaccacaacatatcatcactccttatgtaattttattatacaacgaaacgttatcattgcagtcttaaatttacttttaaaccaaattgccgtaaactaacactattcattaaaggagtctattatgggaaagaagaaaaagcaaaacgcattatccaaaacattagttgaaaaaattctagataaacaaaaagtggcctacacccaacttgaattcccaacagaggaagtccacaacgttgcccaaatgaaggtcgatcatctcgatatcgatgaacatcttatttataaaacattggtgctctctggtaagagtaccggcccaatcgtcggtgtcgtcccgattgattgtcatttagacgaaaaaaaattaagccaaatttctgacaacaaaaaaattgcgatggtcccattaagggagctcgtggccactactggctacgaacatggcgctaacacgcccgttggaatctgggaacaatcccactatccgatttacattgaccaacaggctgaaaaggaaccattcatctatgtctcatccggtaaaattggccgctcaattcagattaatccgcaagacttacagcgggtcactgaagccacctttgctgacatcagtgaagcctaaaaatatgataagaggggctagaacaattcacttgttctagcccctcttatttttgagtttaatctaagtattgggccaaattagcaccagaaatgatgacttgttccttcagcaaatttggttctttaataatattatgaaccaccgtttcgggtaaaacatcattttgtgcgagcatttgcagagcatcatcttgcatcacgacttttttaaccatattatgtattttaatcgttgcaacatatttttgcgattcccgttcttcaaccacttcgtagttgccgtaataatgtttatctgtcattaactcatccccttaaggttaataatatcatatttcaacaaataaaactaagtaacttatcctataataaggggaaactgttaaaaaataccaaaaaaaaagcaaaacaataactgttttgctttttccattatagtaaggagagtacaggatttgaacctgcgcgccggtataagccggttcgacggatttcgagtccgttgcattaccactctgccaactctccagaacgttattcattataacagacttctaaagaactgaacagcgtaaaacgcaaaaaaacctacgtgcgcccacattctattcgatcaccaccatcccatcttgatcaaattgccagtcctttgagtaagcgacttcccaatagtaaccatcgggatcactgaaataaccactatagccaccccactcgccccattctggcgctttgatgagcgtggccccgttagcgagagctgttttaaatgttgcatcgacttccgcttgactatgcgtattaaaggcatggatcacgccgttgaacgttcttggaaatggatgattatctgcggataagccaatatcggctagtagtgcagtgtacggaaacaattccaacttggtcccagtattattgaaaaagacgattgtctcagcattttctaaattcggcgcttgaaagccgagtgcttggtaaaactgacgtgacacggttaaatcctgaacacctaaacaaattaaatggatactattcatcaaatcacctactcgttttaaattaacctgattgtatcaatccgaagctaataacgcaatttcccccgttaattgaccaattattaaatttattgaatcatatttctttttataaaaaaattcgttatacttaaagaatcttaaatgatagaggtttattaatatgaagatttcttatcgcaaactaccgtttttattcaacttaattttcttagttgtaacggttttacaatctttgatcattctagtggttaacccccacgttacgaaattcatccccacttatatggatgccatggcgaaagtatggtggttgtgcattattgctattattttgcatattgttgcttatttattatcactcgatcagaatttgattttactggcatacttatgtgcaatcgtcgcttacatcatcttgattttagtccctaatctattactagttgcccttttcttgttagtggttagcttgatcatttcatttaaagtctatcatttccattatcgaacacctgcttagtcctcgtcggagggctatttttttatgcgctaacccatttaatttatggtataattagtttgaaattaagacaaaagaggttctagtaatgaaacgactaactgcgattctatctttattggtactttgtttactgccttttgtaagcccttacttcttcggcaaaggcatgcgcttttctagtaatcatcaaaaaaatccaatccgctttgaagtttgtcggcatccaaaggtccaccacgcagtcgatcgtgatggcagtgaacaaaaattaaacgccttcaaccaccgctgcgaacggttctttaatcaactcacacttgcgcctgaagcattctacgccgtagctggatttcttggatttaccgtctttattctattattagaaccactacttgcactcctaatgaccctcaagaaagtgccacaacccaaaaaggcacaatcccatactccgcagaagcatcagattgcgccttataagtggcatttattagattagtttaagttcaacttttgataagtataatggccctcttttagtgattgattcgcatatggcgtctcattgagcaacgccacatattcttgggcccgttgttccgaactaaacgcccggatcattttacttttatcataataaagtgggtttgcttgatataaaacaacgtagatccattgattcatctgtcatcacctaactttgtaatccacataaagaaagaccaactcgtaatgagtcggccttttttaatgtcatcttaacgacgagcttctttgatacgagctgccttaccacgtaatgcgcgtaagtagtataacttagcacgacgtacacggccatgacgagtaacttcgatttgagcaacacgtggtgagtgtaatgggaaagttctttccacacccacaccgctactgattttacgaactgtgtaagtttcactcacgccaacaccatgacgtttgataacaacaccttcgaataattggatacgttcgcgagtaccttcgacaacacgcacgtgaacacgtacgttgtccccaggacggaagtcaggaatatctgaacgtaattgagacttagtaatttcttgaattaatggattcattttgaatctctcctttttccacagatattcattaacgtcttgcgccagcggaataccgttgttttgtgactaatcatcacaatttttaattttagcataattcaactgagaataaaagccttatttttcagccgcttcttgcttaatttcttgtaaccagtgcaactgatccttggtcaacgtcatcttctctagtaagtctggacgccgttcatatgtccgtttcaaggacatcttctcgcgccactcgttaatgagcttatgattcccgttcatcaagacttcaggtacctttaaaccgcggtattctggtggtcgcgtatattgtggatgttccaataagccggtcgaaaaagaatccgtaaccgctgattgttcattccccaagacgccaggtacaagccgcgaaatggcatcaatcatcaccattgcgcccaattcgcctccagtgacgacgaaatcgcccaatgagacttcatcagtgactagcgtgcgaatccgttcatcatagccctcgtaatgcccacagataaaaaccaagtggtcttcttgagcaaattcttcggcaactttttggttaaacgttaccccagctggatcgagcaaaataacccgtttgtgccccggattcttggcattcacttgatccatcgcctcaaaaatcggttgtggtcggagcaacatccccgcacctccaccatacggcgcatcatcaaccgaattgtgtttattgactgaaaaatcacggaaatccgtcacttctaaatcaattaagtcacgatcaattgccttaccgataattgattgggataacccattttgaaccatatctggaaataaacttaagacatcaatcttcattatcaatcaatccttctggtacttcaacgtaggctttacccgcttcaatatcaattttcttaacgactgacttcaaaaatggtaagagtaagtctgaacggccgcggcgcttgatcacccagacatcattgggacctggatcgatgatttctgagactttcccatagctggtcccatcggcttcttcaaccacttctaagccgataatatcaccgtagtaaaactcatcatcttccagatcatcttcgcgttgacttgcagcaatctttaaattatggcccttgaactgttcaacatcgttgatattgcccattccttcgaactgtaatagatagaattgcttgtgttggcgcattgccgccactttaacatcaacaaggccattgggcatttcgacggccagttgcacgccttttttaaatcgtgaatccgtaaagtcagtcgtcgcaatgacccgcacttcaccacggatgccgtgggtattgacaattttaccaacttgatagtatttttctggcatttaatttctccttaatcgacaaaaaacgcctaaataaaacatctctgcttcatttaaacgtttttgttaggcatctacaatatttaaacggacccgtttttggtatggtgctttcacactatagacaatggtacggatggactgtgcaacccgtccctgcttgccaatgacgcgaccgatatcacttggattaacctgtaagtcaaattccataaaacgttctgtctcatgttcagtcaatttgacgtcttccggatgttcgacaagtggctgaacaattgcaataattagttccttcacgtctgtcataacgaatccctactttttagcgaagcgtgcttcgtgatatttttgcataatcccttgttttgataaaagattacgaacagtatcagaaggttgtgcgcctttttgtaaccaatccatgataacttcttcttctaacttcaagtcaactggttctgttaatggattgtagtaacctacttgttggataaagcgaccatcacgtggtgaacgtgaatctgcaacaacgatacggtagaatgggcgtttctttgaacccatacgtttcatacgaattttaactgacattaatgccacctcctattaattctttaacatgtcataatataccaaatttcaaacgccgtgtaaagtgttttttctttacaggacaaatttttttaagatttaaaacgacgcgcgtttttgagacgtttcttcttgtttttcttttgttttttcatcattgaattcatggccatcttacccattttacccttgataccgttgcccattaaaccttccatgccgttaaagttgccctttgacatttggttcatcatctttttcgattgattgaattgtttgatcatccggttaacttcaacgattgggcgaccagcaccagccgctaaacgacgacggcgactaggattcaataagtcaggattttcccgttcttgtggcgtcattgattgaacgatggccttcatatgcgccatgtctttcggatccatcttgatgttcttgagttgtgggttattagccatccctggaatcatcttcatgatatcttccaaaggtcccatgctctgcaattgatccatctgatccaagaaatcgttaaaatcaaagctattttctttgatcttttcagccatatcagctgctttttgctcgtcataatcttgttgcgctttttcaatcaagctcaacatgtcacccatcccaaggattcggctactcatccggtctggatagaaaatgtcgagttgatcaagtttttcgccttgaccagtgaacttaattggtttgccagtgacggcgcgaattgaaagggctgccccaccacgtgtatcgccatctaacttggttaggacgaccccggtgacatctaaacgactgttaaagccttcagcaacatcgacagcggcttgcccagtcatggcatcgaccgttaagaggatttcatttggatgggctagctcattaatatcagccaattcttgcatcaaggcttcgttaatttgtaaacgaccagccgtatcaattaagacgtaatcgttcttttgtaaggccgcttgtgctaacccttgacgaacgatttcaactgggttgacatccgtccccatttcaaagacttgtgcgtcaacttgcttgccgacggtcttcaattgttcaatcgcagctggccgataaacatcggcggcaatcatcaatggccgtgctttttcgttttggattaaatattttgctaatttcccggccgtggttgttttcccggccccttgtaacccaaccatcataatgattgttggaatatgtggtgatttattcaacggcacagccgtttcacccatcatcttcgttaattcttcatcaacgatttttacaatttgttgtgcaggtgataagctatcaaggacttctgccccgatggcgcgttccttgacgactttaataaagtctttaaccactttaaagttaacgtcggcttctaataatgccagccgaatttcgcgcatcgcttgattgacgtctgtttcggtaatcttccctttacgccgaagcttactcaatgcgccttgtagtcgttctgttagcccttcaaatgccattttttatcagtcctttaagttaattattgttcggttaaattcagtaagtcagccaacaagcgcatcagttcttgatcgtctggatagtgcgcttgaatatacttttgtagcgtatctgcactggcattttgctgttcataattacggtaaagatgtagcttttcttcgtaaccctctaagattttttcagtccggcgaatgttgtcatagaccgcttgccgactaacattgtattcagcagcaatttcaccgagggaaaaatcatccccataatataaagagatataactatgttgttttgccgttaaaagtgcgccataaaattcgaacaacgaattcatgcgtgcgttttgtgcgagttccatttgacgcctcctagacttagtttgacctaagtattagagtaccgattttaacgggcttagtcaacgttttattgcgcgatttaactagaagtttgtgcattaattatcttttcactggtataaacgaaaaatcatgctaaaatagaactgtaagctttttcataacttaaattggaatttctatggaggttgtatgatggcagcaacaattatctattggggcgttatattcgcattaatcggttgggggatttggaacttaatcttctcagtcgtctatttaaagaacaaggaaaatggtaatctttggttcttcgccattttaaacatcttaaccttattattcgggctattattctggtgggtcttcaacaatcacgcttggcaagaatactggttggttaaagcaaccgcaaccaacagtctactaggtggcattttaatcgcctatgtcgtcttaattatcgcccaagtgattttgggacgcgaaccaaaagccaaaacagcttaatgctaaaaaagaggatcgacacgtttgtcggtcctcttttctaatgttgtttagcgattaatcgcgcgatattttcactgacttgcgttaaattaacttcagtagcttcaattgcttttgctaatgacattgcgccaggtgttgtgcagaaaatactgtcaattcctaattcataaagcacatcaatccccgctccaatatatccggcaatcgcaatcaccgtcgcctgtggattaacttgtttaaccgctttggcgactccaattggcgtcttaccatattgtgtctgaaaatcgattccgccctccccagtgacgacgatatccgcatctcggacaatctcagttaacccagtttgcgccacgaccatctcaacaccaggttgaacctgcgcatccgtaaacgccaataaaccagcccctaagccaccagcagcacccgcacctggtatttgcgcaacagatttccctaaatcacgttcaatcaccgcagcaaagtgcgttaacttccgatcaagttgcgcgaccattgctggggttgctcctttttgtggaccaaacacggctgatgcgccattcgggccggaaagcggatttgtgacatctgatgcaatcacaaccttaacccttgatagtgccggtatcatatgcgtcgtatctatccctgctaaacgcgcaagcgccccaccgcccagtggtaacacctgtccgtcaacatctaacaaacgcaccccaagtgcttgtgccattccagcaccgccatcattggtcgcactgccgcccaaaccaatcacaattgtttgcacaccttgtgctagtgcggctgccattaactgaccggtgccataagtcgttgttatcaacggattttgcgtttgcgcatcaacatactgaatcccgctagcagctgccatctcgatcaccgccgttttgccatcacccaagatgccatattgtgctgataccgtttggtccaatggattttgcacttgtgcggttaagaaccggccattggtcgcatcgacaagcgcttggacagtcccttcgccgccatctgccattggcacttcgacataggacgcgcttggtaggcttttttcgaatcctttccgcattgcacgagccgcttcttttgcggtaacagcatttttaaatgaatctggtgctaacacaattttcatctgttaatctctctttcttctaaaaaaggctagaacaaattatttgtcctagcctttttgctatttaatcgcttgactgacgtctgtatcagttgttttttgtggcccatcaccgacaataatgtccttgaataagccataaacaaagcggtttggatcaaagagttgtaagtcgttcatttgttcacctagaccaaccatcttcactggtaagtgtaattctgtgcgaacggctaaaacaatcccacccttggccgaaccatctagcttggttaagacaatcccagtcacatcggttgtttgcttgaattgtttagcttggactaaagcattttgtccggttgttgcatctaagaccaacaatacttcttgcggtgcagctggtacttcacgcgtgatgatgcgtttcactttttccaattccttcatcaagttgacgttgttttgcaaacgaccggccgtatcaactaataaaatatcaaattgttcttctttagcgcgcttaaccgcgtcatagacaactgacgctggatcactccccgctgcactagcaaccacggggacattatcccggcgaccccattcttgtaattgttcgatggcgcccgctctaaaggtatcaccagccgctaataagaccttcttacccgctttttctaattggtgggcaaacttcccgattgaggttgttttccccgcgccgttgacgccaacgaataagaagacagttaattcgccttgtggggcaaaatgcaattgattatcttctgcttggccttcttgaccatacaaatcaactagcttttcgacaattgcttgagaaaccgcctctggtttcttaacattgcgtaacttcacttcgtcgcgtaattcgtcagcaatcttcatcgctgtttcgtagccaacatcggcttcaattaacatttcttcaacatcatcgaaaaaggcttcatcaacacttctaaagttagcgaacaacgcatttaagcgttgcccaaatgtgagccgggatttttctaatccatcatcatacttcttcgtttcagcagcttgcatgtcgccagttactgcttctgtttccggcacttcttcaatcgcatcggattcttcagttactgccgacgcttcaactggttctggttctggttctggttctggttctggttctggttctggttctggttctggttctggttctggttctggttctgagtttacgggtgccgccgttggtgtgtcaagcggtgataccgtttctgaatcatcttcagttgctaaactggctggttcatcggtttcagttttctcagctgccgcagtttctgcaggggtttgcgattcaaccggcgtagcgtctgattcaaccggtgtttccggtatcgcttggtcttgttcaaccggtgtttctttttctggttcggctgagaatgcttttttaatacgatcaaataatcccatggttttcctcctaggctgttgcgtgttcttctaatgaaacggaaacaatcttcgagattccagattccgccattgtcaccccgtataagcgattggcttgggtcatcgtcccttttctgtgggtaatcacgatgaattgtgtatcactctcataacgtttcatgaaacgaccgaaacgatcaacgttggcttcgtccaacgaagcttcgacttcgtccaaaatacaaaacggcactgggcgtacttttaagatggcaaacaataacgtaatcgccgtcaatgcgcgttcaccaccagataaaagactcaagcgttgtagtttcttaccaggtggttgcgcaataatgtcaatcccactggttaatagtgcgcttggatccgtcaacgttaaactggcatggccgccaccaaacatgatcgggaagatggtttcaaaagcagcggcagtttgttcaaacgtttccttaaaccgcttttcaacttccgtatccatttcagccatcgatgctaataattggcgcttagcgtccatcaagtcggcatcttgttgcatcaagaaatcgtaacgttctttaacgtgttgataatcatcaatggccgccaagttgaccgttcctaaatcagctaagccgagtttcaataatttcaacttagaccgcaattgatcgtcggttaagtctgatgcggccaaagcggccttggcggcttcgtaagtcaattggtaatcttcgctcaatgtatttaagcgttgatcaatgttaattttaacccggttgagcccgacagcattttgttcttgctcagctaaactatttttttgtaattggtagacgcgtgtggcattggcttgaagcgtttgttgttccgccttcagcgtttctttttgcgcgcgttcagtggctaacttcgcttggactttctcaatcaaagcattggttgcctttagcagtgctcgtcgttctttttgactcgaagcgtcttcttgatccgcttgttttagcgcagctagtttatcctgactggccttcaactgggctgccaggtcgttgctattgcgagtagcaaccgttaatttctcctgaacattcttttgttcagcttgagcgacagccaacttggtttcgagggctgtttgttgttgcgcaatttgtttttgactctcatcaaaatgttgtaattgctcattagctgtttcgagatctgcttgcagctgtgcaatcgacgcaacaatttcagcttcggctgccactaattctgcctggcgttttaaatctgcctcataagcttgttgttgttgttgcacttgataatcggttgcttgttgttgccgttcaaactgactcaaacgttcgtcagtcaaggctaacgtattttgggcagcttgatattgattcttagcggtttccaatgccgcttgtttcgtatttaattctgcttggcgtgccgttaattgagcttttgcggcttggacactggcttgcttttgatccaaagcgacctgcatcttggcaatttgaccttctaaatcagtcaaggtttgcttacgcgcaagtagcccaccattgttttgtcggttattatggcccccagtcatcgaaccacccgggcttaaaatatcccctgctaacgtaatgattcggtaacgatgccccgtcaattgactcaatttaatcgccggctccaactcagtcgcgacaatcaaattgcccatcaaatggttcatcaccggtcgcacttgttcatcaaactgcacaagctcactggcaattccgataaatccaggctgctgttgtaattggtgaactaagctacttggtagtaaacgtggtttgacaacgttattgggtaagaaagttgcccgcccaatccgattggttttcaaatactcaatcgcttgtttggccgtctgttcatcccgtgtcacaacttgttgtagctgtgcgcctaatgctaattcaatcgcttgttgatactcactgggcacttgcatcaattccgctacagcccctaataaaccagggaactgttgtttttgcttcaagacagccttaaccccttgataaaagccggcgtagtcatcatttaattccgcaagactagcttgttttgctttcgctttttgtaaaataccagacgcttggaaccaactattttgttgattttggtaagccgcttggtccgtgttaatttgcgtttgtaattcggccaactcattggacaacgtttcgtattgcgctttgagtgtttcaagttgggctttttgggccgcttgttctgcctttttttgtgccaattgcgtcgatgtctcatcgactgcactatcttgccgtgcaagttgcgttttagtttgtaacaagttcttttctaaatattgttgttcattatgattggtcgtttgggcttgcatctgatcgatgtattcttgacgaatttgttcaatcttcgctttcagttccgcttcactaccagacgcttggcgtttaagggtggttaactccgtcttcaacgccctcaatgccgtcactttttcttcataacttgcctttaattcagattgattggcttgttccgccgttaattgctgttttaatgtgtcgatctgttcgactaaactttggcggttcgcatccgtataattagcgcgctcttttgaaacgttctcttggcctaatagattttcagccaagcgagacttttctaacaacgtctgattatcttgttctatttgttgttccaactgggctaaggttgcctgattctcggtttgggcagccgtcgtcttagcgatgtccgcttcaatctcttgcaacgcttgcgcaagggtttgcgccttttctttgtacgtcttttgatcagccactaattgatcaatttcaatcaccaataattgttggtgcaatgcatcatattgcgctttttgatccaagtaatcctgcgcaatactgctttgttccttcaacggttcaacttgtccccgtagttcatgaagaatgtcggtgacccgactcaaattttcatctgtttgatctaattcagattgagcctttttcttttgttgtttatatttcaaaacaccggccgcttcttcaataatattccgccgatcttctggtttactgttgaaaattgcttcaacccgaccttgcgaaataatcgaaaaagattctcgcccaaggccagaatccataaataaattaacgatgtcttttaaccgacaactcttttgattcaaataaaactcactatcgccatttctaaataaacgccgcgtaatcgtgacgttggcttgttcttgtttcaaatattgatcgctgttatcaaaagccagcgtcacttctgccttattcatctgtggtcgaatatcagtcccggcaaaaatgatgtcgggcatcttttcgccccgtaagctcttggctgattgttcgcccatcgcccaccgaattgcttctgtgacgttacttttaccgctcccgtttggtccaacgatgcccgttaaaccttctgaaaaattgatttctgttttatcagcaaatgatttaaaccctgataaaaccaatgactttaactgcatgcactaaactccctacacacggcggttggtttcaactgtcgtttgcttctttctttatttcagtttggcaagcgccactttagcagctgcttgttcggctgcttttttgttccggccaacacctgaacctaagacgcgatcgcccatcatcacatccacttcaaattgacgggcatgtgatggtcccacttctgccaataacttatattcaatctcaacttcaccatcttgttgcaagaactcttgcagattggtcttataatccgtttggtctgaaaattcaccggcttcaatcttgggaaagacaacttgttcgatgaatttaacaactgcgccacgcccttgatctaagaacaaagcgccgttaaaagcttcaaataaatcttccaaaagtgttgctcgtgcccgcgcaccgtttttttcttcccctttaccaaggcgaatgtatcgatcaaagtgcgcttctttggcaaaactactgaaactcttcgtgcagacgattgccgcccgtaagcgtgtcagtttgccttctggccagtccggatattttttatataagtattccgaaaccgtaatttccatcaccgcgtcacccaagaattcgagccgttcgttatcacgaagacccaactcccggtgttcattgacgtatgacgaatgtgtaaaggcttcgtccaatagtgctaaattctgaaattcaatgccgtagcgggctcgaagctcgctcactagtgctgcatccaaaattaaattaccccatttcaactgtttaatctttcactattataccgtttatacgcttaaaaaaacagcgtcgttcctagcaaaccgtttcttttattaatcactaaaaaacgcctgttttgaagtattcattgtaacacgcaaacgaatatttcaaaacaggcgttgctttatgcagatggcgttgtcattgctgctaaagcggtttgataactcgctagttcagcttcagttgcatagacatagtgttcatcggccacttcgcgcaattgacgaccttcattatctgcctcaattgaactatcataagcaattcgccgacgttgccgctcgacctttggatcaggtaacggcacagcagacaatagactttgcgtatatggatgcaatggtcgatcataaatgtcatcggctgatgccaattccataattttaccgttatgcatcaccgcaatccgatcactaatgtatttcaccatcgataaatcatgtgcgatgaataaatacgtcaagttttgctgttcttgaatttctttcatcaagttaaccacttgtgcttgaatcgatacgtcaagcgccgaaatcggttcatccgcaatgataaatttaggttttaccgcaagcgcgcgggcaatcccaatacgttggcgttgcccaccggagaattcatatggataacgcgttgcatggtctttattcaaaccaactaattccaaaagctcgttgacgcgtgcatcacattctgcatcatttttaaccaaatgatggatatgcaagccctcagcgatgatatctttgactttcatccgtggattcaatgatgcgtagggatcttggaaaatcatctgaatctctttccggaacgccttcatttcacgactatgatttttaatcttactaatgtcacggccatcgaatagaatttcgccatctgtcgggttgtatagccggatgatactccgcccagttgtactcttcccagaaccagattcacccaccaagccaaacgtttcgccttcatagatttcaaatgagacatcatcaatggctttgacttcggatttttttccttggctaaaatattgctttaaatgtttaaccgacactaatacttttttatccttgtccatcaattgtccctactttctcttgaacttgtgtcgcctggtacttagccatcattgcacggacggctgctggtggttccacagctggtgcatctggatgcaacaaccaagttgccgcaaaatgcgttttcgacacttggaaaaatggcggttcctgttccacatcaatttgtaaagcatatggattacgcggtgcgaaggcatcccctttcggtggatccaacaagtctggtggggtccctggaatggcttcaagacggccagaagtatcaagtgttggcattgagttcaataagccccacgtatatggatgcttgggttgataaaaaatttcatcaaccaacccatattcgataatcttaccggcatacattaccgctacgcgatcggcaatccctgccacaacacctaaatcatgcgtaatgaaaataattgaggtttcaatcttgcgttgcaattccttcatcaaatcgataatttgtgcttgcactgtcacatcaagcgccgttgtcggttcgtcggcaatcaggatttgtggataatcaacaatcgcaatcgcaatcacgattcgttgccgttgcccaccagaaaattgatgcggataatctttcatccgtgctttggcattcggaatacccaccaactctaaaacactctgtgcacgtttcattgcttcttccttattcattgttttatgaatcaacaagggttcagcaacttgtttaccaatcggcatcgttggatccaatgacgtcatcggatcttggaaaatcatggaaatatcgctaccacgtaaggcattcatttcctgttctggtttttgtaagagatcttcattgtgatacttgattgtaccacccttaatttgagcattacccgctaacaagcccataatactacggaccgttaccgacttacctgaacctgattcaccaacaatcgctagtgtttcgccttttttcaagttgaaactgacatcgcgaatagcatggacgtcccctgcgtaggttttaaaatcgatacttaaatgtttaacttctaaaatatttgccatttgacgacctccaatgatgaaaccgcgtggaaacggccttgtattgacatgctttttgaaactgactctgcttctaaacgtgctttcattaactgctttctgtggttagctacgtctaataaataatcaacaagttgattattcgtcagactatgctaatccgcgaaagctaaccgcctacttgcacacgctatgattttggatcgaatgcgtctcttagtccgtctgctagtaagttgacggcaatcatgatcacacagaggactgctgctggataccacatttgatatggcaagaaacggaaagctttttgcccatctgataataacgtccctaatgaagcattcggtgctggaatcccaatcccgataaagctcaagaacgcttcgaagaaaatcgcactcggaattgtaaacatcgtttgaataataatcgttgaggataaattcggaatcaggtgtttccaagcaatcttggtggaactttcacccaacgtccgtgcggcgagcacgaattcttgttccttaagttggaacgtttgggcccgaatcaaccgggccattgtaatccaaccggtaaagccaatcgcgatgacgattgacaataaacctggacggagtaccaacatcatcaagacaaccacaattaagtttggaattgatgaaatgatttcagttacccgctgcatgaacatatccaaacggccaccacgccatccggaaacaatcccgtatggaatcccgattaataaatcgaccaatgtcgctagaatcccaattaataaggataagcgtgtcccgtataaaattcgtgataataaatcacgaccgagataatccgtccctaagataaacgttttgcctttgggaacgcccgcttgttgatatttatcaactttaacaccggaaacgtccatcttaccggtaaaaccagggatattccccgatccaattttaggcggtaagttagcgtacgccacattttgtgtatttggactttgtggtgcaatcactggtgccaataaagcagccaacatcacaattaagaggacaactaacgaaaccaccgcgactttattttgctttaagcgccgaatggcatcttgcgtaaacgtcaatgatggtgcactaattttttcttgtgcttcatgcgtgtcttgtgtaaggggcttgaatgagcccgctggtattttaatatctgccatttagtgcgccccctgactgtcacttaatcgaattcgtggatcaataatcccgtaaagaatatcgacgactagaataatcactgttaataagaatgaatagaaaatggtcaagcccatgatcgttggataatcattcgtcataattgacttcacaaattgctccccaattccgggaatcgagaaaatattttcaacaactagtgacccagtcatcaagttgactgccatcggcccgataatcgtaacaaccggaatcattgaatttcgtaaggcatgctttgccactgtttgccattttgaattgcctttggctttagcaagttcgatgtaatcactgtttaaaacatcgaccatttcagtccgcatgaaccgagccgtattcgccaatggtgcaaccgctagtgctaatgttggtaagacactagatgaccagccgtcccataacgcaattgggaatagttgtaatttaaaggcaaggaaaaattggagtaagaccgccaacacaaagttcggaattgaaatcccaacgattgaaaagaacgttgcaacgccatcgacccatgtattcttgcgaatggccgccactgcccctagtaaaatacccagtaatgagccgacaatcatcgcttgtgccccgatttgtaatgaaggtcctaaacgcgtcatgattaggctcaagacgggctgattgttgaactggaaggatgtgccaaaatcaccatgcaacaagccacctagatagatgaaatattgctgaattaatggtttgttcaaaccgtactgttcattcatgatccgtaattgatcagcactcattttttcctgattcgtatatggcgtccctggcatcaacttcatcatgaagaaggtcacagaagcgacaatgaatagggttagcactaaatagaatattcgtttaataaggtatttactcataagttcgctcctaacaaaaacgggcttcattgtttttcaacgctgaagcccatctttataaagtcagtttatttttttaaataaagtgagacattattgtagcttcctgaagggccgtagtctaaacctttaaggcttgggttagttaagtacgccacacctgattgatacagtggaatgacacctgactctgtattcataatatcttgtgctttaacaaggttttgccatcttgctttaggatcattggcgttgtcacctttacttgccttgatctgtgcatcgtattcggcattgctccaatggccatcattgttatcgccgcctgttacaaacaagtctaagaatgtgattggatctgggaaatcagcgttccaagcactaaccaccatgtcgaaatcaccgttcgttgaacgtgttaaacgagtcttaaatggcacgttcgctaatgtgactttcaaacctggtaagttcttttgtaaagtattttgcaaatattcggattgtttcttggcagtatccgtatcatcgccaagtaatgtgtaattgaatgttttgcctgtttgcccagtttcagcaaggccttcgttccaaagttttgttgcttctttagggttgtaacttgcatttttcttacccgctgcgtctaaatcatcaacaaaatccttcttagttgttgggtcaaatgacatattctttggtgtcacagaagcaattggacttgaaccatcacctagaacctgtgcgactaattctttacgattaattgtcattgaaattgctcggcgaatcttcgcatttttaaagattggattcttttcttggttgacttgcatgtagaatgttgctgatttttgtaaggttgagtaatgtggatcgtttttcatttgtttagctgtgtcaccactgatcgccgtccgatctaatttattactttggaagaggtttaaagctgttgatggatctttaaccacttgatacttcaacgtcttaaccttaactgctttcgtattccagtaattggtgtttttaacttctttccatgagctatctgggccattccaattttctaatttataagggccgttgaaaactaatgttttagaatttgtcccgtaactcttgccagctttcttgactgcttctggatattgggggaagaatgttgaactggtcatcaattgactgaagtatggaattggtttttcaagggtgacttctaaggtgtgtttatccttagctactacacccaatgaattaaccggttccttaccagtcgtgatgtctgctgcatttttaatgccttcatagatataagcatattgtgaaccgacctttggatcaacgactctgcgccaagcataaacgaaatcttctgccgtgaccggttgaccgttgctccacttcgcgtcttttcttaatgggaatgtatatgttaaaccgttattagttggtttgactactttagtcgcaatcgccggtttaatttctttaccctcgtagcggtaaagaccttccatcgtatcggttaaagcctgtgcaccgatcacatccgtatttaacgctgaatccattgtcgaaatgacatccccagttgcaaaactggctgtgtcagtcttaacggcttccttgctacctgagttaccacaagctgctaataataatgtgaccgccactgttgttatacctaataccaaactcttttctcgtttcatatggacactcccttcagttattaaagataataatacatgattaaaaatgaaaagtaaataataaagattaaaatattctaatttattttcattgatgcagagccattataagaatcattctaatattataacgcatccgcaaatgattattatgtgaataatctcattttcacaaactgtttaaaatgcaaaaaaataagcctgtcggtcgcgaatactcacaaccaacaggctcgtttttaaggttattatttgatttttgttttaatgtaagcaacggcatcagctaccgtaccgatcttttcagcttcttcatccggaatttcggcaccaaaagtgtcttctaattccaaaacaaattccacaatatcaattgaatcagcatccaagtcttccttgaagttcaattcgtctgttacctgatccttatttaactcaaatcgatcgccaataatagccgcaatcttatcaaagatttcttgttcattcataattaaaaacctccaaattgaaacccttacctacgtacttaacactttgggtatccagtgattatacataacttcgcaactcaattcaagtaaatcaaatcagacttgcgaagtatattgtagcgcctttggaacacattgtccacctattttaatcggtttcttttgggctattttgttggtcaaaataatcgattactttttgaatcgtttggttcgccagcattgcatgaatctggcgaacagtgtagtaaaccgtgcggccatctgcagcaccgtgcgccttaacaacaggggcttttaagcctaataaaacagccccgccataaacagatgtgtcgaatttatcacgaatcccaccaacactctttttcaagagtaaaccaccgattttttctttgacaccagcatccataatcgcatgtttgacttgcgacatcacgattgtggcagtcccttcaattgctttaagcgtcgcattgccggtaaacccatctgtgaccacgacatccgcaaccccttttaagagttcacttgcttcaacgttaccaatgaagtttaacgttagatcatctgccagtagttgatgtgctgccttatgcaactcatcacccttgccagcttcagtcccattattcaacaaaccaattcgcggcttttgaatgccacggacgtcttgtgcgtagaagttccccattaagccatattgatgcaaatgctccggctttgcttcggcgttggccccaacatctaacatattgaagcctaaatctgaattaatggctggtagggtaggcattaaacctggacgatcaatccctttaatccgaccaatcacgaataatccggctgctaagagcgcaccagtattccctagtgaaaagagtgcgtctgcttccccatctttaactgcctgcgccgccagaaccattgaagcttgctttttacgccgaatcgcacgcactggttcatcttcgctggtgattttttcggtggtatgcacaatcgttaaccgcgtcatatcatcaatcaacggtttaatttgcgcttcatcaccatacaacgtaaattcaacatctgttaattctgagcgggcttgtaacacaccttcaattactgattggggtgcaaaatcgccgcccattgcgtctactgcaattttcatcatcattcctctttccgttttcaatctaacgttaggtaattttgcttttgttgttgtaagtatgttttgagtggcgtatggtccggtgctgccaactcaggatcaagcgtgaagattttttgcacttcttgttgggcgacttgtaaactcgcaaagtcggctactggatcgccaactttaaagacgggcaatccagattgacgatcaccaaagacttcccctggcccgcgcaattctaaatccttctgcgcaacgacgaatccatcagtggtttcagtcataatcgtcatccggtcaacaccttgttggttcttcggatcagccaccagaatacagtatgcctttttcttacctcggccaacccggccccgtaattgatgtaattgcgccaacccgaaccgatccgcatcaaaaatgagcatcaccgtcgcgtttggcacatcgacaccaacttcaacgacggttgttgaaaccagtaattgaattttgttctcagaaaaagcgttcataatctgatttttttcatcatcttttaactggccatgcaacaatgcaacatggtaatcaggttcaaattgttctaccaacgttgcgtaaatctcctcggcattctttaaatccatctgttcagattcggcaatcaacggtgtaatcgcaaagacttgcgaatcgtttgcaagttgtttacggacaaagctgagggcttgttcgacttgattactacgcacccaactggtttcaattggaatccgtccttttggcaattcatcaatcgttgaaacgtccatctcgccatacgcggtaatcgccagcgtccgcggaatcggggtcgccgtcattgcaagaatatcaggctgtaaccccttttcacgcaaaattcgccgttggttgaccccgaaacgatgttgttcatcaattacagcaaagcctaacttatgatagaccactgcatcttgaatcaaggcatgggtgccaataataatattgatgcgcccggattcaatgtctgccaacaacgtccgccgttctttagccgtcgtcgaaccggtcaataagccaacagtcacgttcattggtgccaataagcgttgcaagctttgatagtgttgttccgccagaatttccgttggcaccatcaatgcggcttgataacccgcagtcactgccgcgaacagcgcaatcgccgccacaatcgttttcccagaaccaacatccccttggagaaggcgattcatatgcgctggtgattttaaatcaagacaaatttcattcaccactcgcttttgtgcatcggttaaatcaaacggtaaggtttgaataaaatctttaagtgcttcattttggtactgcaaagctaaaccgtttgccacatgccgatcagcctgtttaatggcttgtaattgaatctgatataggaagaactcatgaaaaatagcgcttcggcgtgcttgctttgcttcaggatacgttttagggaaatgcatgccagcaattaagtcgcgttcgttcattaacttatagcgcgtgcgaatatcctctgggatcaattcgggaataacgtcctgatacaaatcaaaggcttcttgaatcatcttgaccagtgtcccttgacgcacacttttattaacggaatagatggccgcaaacgatggattctcagccgattgaaccgctaggaccttcatccccgtcaatgtatgacgtttagcatcccacttgccataaatagcgacatcgaccccggcttcaaacttgtccttaagatagggttgattaaaaaaagtaaccatcacaacgtcatgttcaatcaagagccgtacattcagccgggtcttccctggtccccaacgactgatgaccggatcagcgacgaccgttccttttaacgtcaccttttcctgatctgccgcttcggataaatccttgaccttcaaatcttcgtaacgaaacggaaaataatacaataaatcactaatggtccttatgccaagctgatcgagggctgtcagacgtttcgggccgacgccagctaacacagcaacagaatccgttaaacttaacattgacagcctcctgtaacgtgctttcaaaagcatcctgttgcgtttagcaccattagccaaacaagtagctacgctagtcattcggctaattaaactaatcctcacaggataagcacttttgatacacttctttttcttaacgtgctttttaaccatattccaaggttaaacgtacttctactaaaaaacgggaaccaggtatattcaacctcattcccgttttatttgattaactattcaactgaaatcaagtatgggtaaactggttgattcccttcgtgtacttcaacttctaattctgggtcttgggccataattgcatcactgatttgttcagcttctgttgcatcgccgtcttccccgataataattgtgacgatttcactgtcttcatcaagcattgtttggaccatttcaatggctgctgttaaacgttcagccgttgagaccttaatcttaccatcgataatccccatgtaatcgtctttcttaatttcaagtccatctaaagtcgtgtcccggattgattgcgttacttgaccactaatcacggtatctaacgcctctgtcatggcttcttgattagcagccaattcagcagatgggtcaaatgataagagagcggtcatcccttgagcaatcgtccgactttgcacgattgcaactggaatatcagccacttcggcagcttgttcagcggctaagaagatgttcttattatttggtaataagatcacttgtttagcattggctgctttaatcgcatctaaaatatcttgcgtacttggattcatggtttgaccaccacttaagatataagtagcccctaaactcttgaagagttcagcaatcccatcaccggccgcaatcgcgataatcccattttcaacaggttctgcttgcacaggggcagcagcttgttggtcgttttcaacaatcgtatcatgttgtaaacgcatgttatcgactttaatcttcactaatgaaccaaagtgttggccgtaagccatgactgtccctggatgttctgtatgcacatggaccttcaccacttcttcatcggctaccactaagagagagtcaccaacaccgtttaaatgattgcggaattcatcataatcaaattcgcgatcgacagttgtcccgtcaccaagggcgaccatgatttcagtacaataaccattttcaatatcttctgtacccatttgagcggtttgatgatgattggcattgaccatttcatccatttccgcttcatcaggtgtgtaaagatcttttgcaggtgcttggcctgttaaaccttctaagaaaccttcatagatgaagaccaatccttgaccaccagaatcgacaacgccgacttcttttaagacagggagtaattcaggggtcttcaacaaggccttcttagaaccctcaacaacagcttcgataactgcaccgatatcatcagtttgaccggcaaccttggcaccagctttggcgccttttctggcaaccgtcaaaatcgtgccttcaacgggtttcattactgctttataagccgtttgaacaccatttgtgaatgcgtcagccaaatcttgtgcatccaacgtttctttttcagccatgctcttagaaaaaccacggaaaatttgtgaactgataaccccggagttaccccgagcgcccatcaaaagccccttggctaaactcttagataattcaccgacagattgcgcgttgttttcattaactgctttggccccactttgaaacgttaaactcatattggtcccagtatccccatcaggcactggaaagacgtttaatgaattgacaaattctgcatttttagtaagccgatgtgcagcaacccgcatcattgcttggaattctgctgctgtgatttcagtaactttcacgaatgttcctccttgaacaaaaacaaatagaactggacctagtggccagctccgctaattagttttagtcttctaatacccgtacaccttgaacataaatattcactgagttcgcaccgacacccaacattgtttcaagattgtacttcactttactctggacgttacggcaaacttcagagatcttaatgccgtaaccaacaataatatagacatcaatcgcaacgccattgtcttcttgacggactacgacaccccgattataattctcacgattcaaaatatcgtttaaattgtcacggatttgattcttacttgccatcccaacaattccgtagatatctgttgcagcaccaccaacgacggttgcaatcacgttattggtaatatcaatatcgccatattgtgttttaattttaacagccattaaaatagcctccttgtgccatacttattgttattttagcatagcggagaagagttgcaaagcaactggtgatgaattcttccccaaatgcggcttatttttggactttaatgagtttaaacgacttattttggactgtcaagtaaatttccttgaaagagctcttgcattccccaaactattatggtaaattatttaagtgaattgtataagccggtgtgcatgcatgcaactattaagactaactgaatcatattatgtttctcgttaattctaccggctttacttaaaggaggaataagaccatggcaaaagacgttattaccggccgtaaaacatcatttggcaacaagcgttcacacgctttgaacgcatctcgtcgttcttggaagccaaatttacaaaaagtacgtatcttagttgatggcaaacctaaacgtgtttgggtttcagcccgtgctttgaaatcaggcaaagtaactcgtgtataatttcaattgatagaccgccagttggcggtctattttttttggcaaagagtacgagataagtcggctaatcatcgggagatgactgatcgaacacgtttatggcaaccaaaaagacggctcggataaaataattttatccgagccgtctttttaatccttactttgaatcaccgcaaccaccccagtttcaaaactgaattggccggtctcaccgatgaactcattactagcccatgaaatcgggacttgcgtttggtaatccaccaagcgatatttttcatcaattaaatttaaaccagttgtgggaactaatggcacaaaggccagataccgtttatcggcttctttttgtaattgatacgtccctggtgcatagaaccgaatcgtattttgccgatcgcgcatctctaagcggtctaaaaacggcttaaaacgtgtttctaagggcataaagagattagcaagaaaatggtccaaccgaccgcctgttgcgccataaagcacaacttgatccgcattaaattcagttagcgcaattgataatgccaactgagtgtcggtatcatctttttctgcttgcacagagcgaatatcctttactgctgattgaacggtggtccgctcagccgccgtcaatgaatcaaaatcgccgactgacacgacaggtgttacgcctttttgcaataagcgccacgtaccacggtctgctgtcacccattgaccatcaatcatttctggctgcgccaattcgggggcccactcactgactggtcctcccaccaacacattaatccgcgtcatgagcagcctgctttaaagttgcaatccgagttgctaaatcaccggcaaacgtatatgaaccggcaacgaaaacatctgcgcctgctttggcacacgcaccgacggtttggtcgttaaccccaccatcgacttcaatcgtataatctgcatcagcatgttgatcgcgataagtcgctaattcagtgaccttatccaacatcgctggaataaacttctgcccaccaaaaccgggattaaccgtcattactaagacttgatcaaccaatgataagactggttcaatcgcactgactggtgtccctggattgatcaccacacctgctttaacaccagcatctttaatcatctgaagaccacggtagagatgttgcgttgcttcggcatgaatcatgattaagtctgaaccagctgctgcaaattgttcgatgtagcgttctggttgttcgaccattaaatggacatctaagcctaacgttgtcaatggccgcaagccagttactacttgggggccaaacgacatgttggggacaaacatcccatccatgatatccacatgtaatagatcagcgcccgccttttcaaggttttggacgtctctttgtaagttcataaagtctgcgcttaaaattgaaggtgcgatttgtttcatcatcaaaactccgatcacatttttattttgacttcttgtaaactggccgaatatcctttaattctgctctaaactgtaaataattcgtataacgactttgcataatttcgccactgtcgacagcttctttcacggcacatttcggttccatcacgtgttgacacgttctaaacttacatccttgcccgatttctctgaactctgggaatcggtcaaccaaggtttcaatcgtgacgtttaataaaccaagtgatgaaaagccaggcgtatcaccaactaacccatcattcaacggaatcagttcaatatgccgggttgtatgtttcccacgatttaaactctgcgaaatttcggcagttgcaatattcaagctcgggtcaatgtggtttaacaacgttgacttaccggcccccgtttgtcctgtaaagacggttgttttatgcgggaacgtgtcttcaattgccgtaattatctccggtgtaaaggcggtccgcggtgcaaaaatttgatagccgatcttcgcgtaatacgccaagtaatcactaatttcttggtattgttgatcactaatcatatcggtcttggttaaataaactaacccttgcatgtgcagcgattcaatataaatcaagaagcgatccaacaaattcaaggagaatgctggttccaccgccgaaacaattacgacagcattatcaatattagcgactggtggtcgaatcatctcatttttacggtctaaaatctcaagaatatagccactttctgtttcactttcactctcgaattcgacaaaatcgccgacaagtggcgtaattttccgtttacggaaattaccacgcgcacgcgttcgataaattttgccttcactttgtacatcataaaacccactgagggcgcgaataatctgtcctgtctgcaataggtcacctcccaattagtttgtcacatggtcatcagatagaatctcttgaccatttcttaaaatccggaaacggccggcttggtccgctttaatcgtaaatggcaattcaacggttgtatccgcggtaatcgtcatttctttataaacactcattattgaatgcgtgctatcttctaaataaatcgtaatcttattcgtcgtagccgttgaagtactacttgaactagagctcgtactactactgtcacccgattcgctcgagctgcttgtactactttgtgaagttgctaaggaattatcaaacggaatcgtaatcgacttcgtaaaactcttggtagcgggcgcttttttacctttagaaagtaccacgttaatattggcaccttcttgaatagacgcaccactaccaggtgattggctaatgactaacccttcatcaatcgtattggagtaatcctctgaaaaagtaaccgtcaaaccaacgtcatcaacatagtcttgaacagcctgtttcgtgtaattactcaaattgcgtaaagtaatgcttggcttgccgctgctgacagtcaaggtaatcgtcgtcttacttgggacaactttttcacctgcggcaatgctttggtctaaaaccagtcccgaagcaacactgcgtgaactctgatatttgcgcacaaccgtcagtcccttttgtttcaataacgtgctgacatctgtgaacggtttgtccgtatagtcttcgatctcatactttttacgacccgtactgattgttagatcaaccgtactgcccgatttaacatgcattcctttaccaggcgtcgataaaatcacatgccctttgctgtacttattgctagtagttttttgaatcttaccaacttttaatttatctgcggttaatgctgcagtcgcgttttcttgcgtcatgtctgtcacatctggaacagtcacttcactgccttgcattgcgtacgcagcgaagaccccgagcatcactaacaagactacgccaagccccacaaaccaccatttccgcttcgacttcttatgcggctgtttctttttctgatcgtcttttacttcagtctcatctttgggtttggcttctggcgcatcgttttggcgcgtaatcccttctgggtcgagagccggaatcacctttgtttcacccatatcaccttgtgagggcacgaatttcggttcatgcgcccgactagctgataatgaggtactcaaatcagtggtcatttgcccaacatcactgtagcgttcgtccggatctttggcagttgcttttaacacaacgttttccaaagcttgtggaatccgcggatcataatctcgaacgggtggtacagcatcttgaaaatgtttaatcgcgatggaaacagccgattcaccttcaaatggcaccatacccgttaacatttcatacagaataatcccgagtgaatagatgtctgaacgtttcgttgccattgaaccccgtgcttgctctggtgataaataatgcactgatccgagtaatgtattggtctgggtcatcgcggtttcactgagcgcaatcgcaatcccaaaatcgctaatcttaacgttacctgcttcatcgaccaagatattctgtggtttcaaatcacgatgaataatatcgtgcgcgtgggcattttcgaccgctgataaaatctgcgtcataatatcgacgacgcgttgataaggaatcgggaagtgttcaacgatatacttctttaaatctgttcccttcacatattccatcacgatgtattgcatgctgttttcttcaccaacatcatagatactgacgatattggggtggttcaattcagttgtggcaagtgcttcgcgtttaaagcgacgtaccgtgttcggatcgttccgtaaatcaagtcgcagcaccttgaccgccacttggcgatccaaaatcagatcttgggccagataaacgttggccatgccaccttctccaattggacggataatctgatagcggccattgaccgcgtagcctgtctccatcatcgcgcaccctcctcaccagtttgatgtaagattaacgccgtaatattatctaagccaccggcatcatttgcttgttgaattaatgccgcacatttttcttccagcgatgtcggtgtcatcagcgtggtcttaatttgttcatcatcgaccatattggttagcccatctgtacataataatagataatcatctggttcaaattcgtaaattgttacatcggcatcgacatcttgcgaaacgcctaatgtgcgcgtaatgatgtttttttgcggatgatgctttgccgcttcttcggttaactccccttgtttcaccaattcatttaccaaggaatggtcctctgttaattggcggagttcgttattccggaagcgatacactcggctgtcgccaatattggcaactaagtaattggcacctgaaatcaacactgcgacgagcgtggtgcccatcccaaacaaatcatcatactgattagccttcgctaaaatatgtttgttttctttttgtaattcgaaaattaaccatttaaccatggattcaatgtcggtatcatcagttcgttcgaactcgtacccaatatgggaaaccgccatttctgaagcaacatcgccgcctaaatgaccgcccatcccatcagcaacaatcgcaaactgcgcaccgcttttattggtataaaagccgacatagtcctgattattttggcgttgttggccgacatcggtttgaaaagcaactttcataagaattcacctcaattaataatttaagcccgtcgtgttaaacaagcgatgaaaaagccgtctgtttgataatcatcgggatagatttggacaaacggtgtcgcttgattggctggcaatggtttgtcgagtgctactggtacgatttcaaattctggatgattggccacaaaagccgcaacaacttgttgattttcttctgggacaatcgtacaggtactgtaagtcaattgaccacccacttttaaggttggtgcaacggcttctaaaatcgccaattgaatcttttgaaggttcaataagtctgctgcttggcgacaatacttgatttccggtttacgtcgcattaagcctaagccagaacatggtgcatcgactaaaatcttatcaaatgtttcaggttcaaattgttcaccgactttgcgtgcatcgagcgcccgcgcatcaatgacgtctgcaacatgcaaacgcttagcgttttgctcaatcaagcggactttatgttcatgaatgtctaaggcagtaatttgccccccttgactggcatccaaataagtcgccatatgtgtcgttttcccacctggggctgcacaagcatccaagatccgatcacttggttgtagttgcaaacttggtgccactaacatcgagctttcatcttgaattatatacgcgccttgttcgaacaattcaccgctggctaagtgaccgccgtgggcaactaatccagcggctacaattacactcggtccaatcgttaacccgtcagcctgtaagtctgccaaaacggcatcaactgaattaacacgggtattgactcgaatggacgcattcgctggttggttaatcgttgccaataagtgttccaattttgattgccctaattcttggtggaacttcgccactaaccactgcggcatactgtaagtcacacttaggcgttcgattggatcggcaattgctgctaaatcaggcaatccagtccgttgttggttccgtagaattgcggtgaccaacttagccgtgccagcatggcccatttgtttggcaatctcagttgcttcataaaaaatcgcatgttcaggaacacgatccaaataaacctgttgaaaaactgccgtccgtaagacttggcggacccaagttgccagtttagctggtttttgaataaagggggctaggtaataatcgagtgtcatttcatgttgaatcacaccatacacgagctgcgttaaaaaaccagcatcttggggattcaagtggttttgtttaatcacttggtcgagggccaagtttgaataactgttttgtttggcaaccgccgttaaaatttcaacagctaaatagcgtggtgtctttttaggcatcttgcaccaccacttgttgtccgactgcgagttgtttgccaaccccgtttaagaaagattggaccggcattttagccttaccagctggttgaatctcggtaatcttcaaaacactgccattgccggctgctaattcgaaatcctttttgttgatagcgacaatcacaccggctggttgatccgtcgttgtttcagcaacagttgcttgccataattttgtccgttgaccattaattggcaaccaagcgcctggttgtggccgtaacgcacgaatctggttgaccagttgcgttgctggttgctcgatatctaattgttcttgttccttagtaatattgtaagcaaacgttacttgtgcttcatcttgtggtgtccggggcgcggtttgatcgataatgcttggtaatgtcttcaataatagatctcgaccgacataacttaacttatcaaataaagtcccggtgtcgtctgaagcttcaattggaatgctggcttgttcaatcatatcaccggcatccatttttttagccatatgcatgatggtaatcccaatttctgaatcgccgtttaacacagcatattgaatgggtgcaccaccacgatattttggcaagagtgaaccatgcacattgatggctgcaatcttagcggcttctaataacttcgttggcaagaattgaccatatgctgccgtcacaattaaatctggttgcaaggccatcacgtccgctaattcttgactaccactgagtttttcaggttgaaaaacagtcaggtttaagcgaacagccgcttctttaacgggtgtttgttgtaggacttgcttgcggccaactttccggtctggttgggtcacaacggctaggacttgataatcgtgtgccacaagggcttctaaaatcggtactgaaaattggggagtccccataaatacgatggatgtcattaatcaatcacgctcactttaagtaaattgtaggggttcattgtccaacccaatcttgaaaccatgacgggtatcaatttgggtcgtttcgagaatctcggcgagtttcgcctgaagttgtggttcctgtttatatttaatcacaatttgatagaaataacgattattaatccgcgcaatcgacttcggcgtcggacccagcacaatcgcttggtcggataagacgggccgtaattgacgggcaatctggaaactcttcttggctgccaacgcttcttcaggatggctaatcgttaactgtaccgtaaaataatacggcggatagccgccccgatggcggactgccatctcatattgatagaagccttcataatcatgttgcttggcaaattggatggcgtaattttccggattaaaagattgaacgataaccgcaccgattttatcggcacgaccagcacggccactgacttgcgtcaataattgaaacgtgcgctcacttgcccgaaaatcaggtaacccaagggcggtatcggcgttaatcacgccgacaagcgttacatcgggaaaatcaagccctttggcaatcatctgcgtgcctaataaaatatcggcatcgtggtcgccaaagcgtttgagtaatttagcgtgcgcaccttttttgcgggttgtatcaacgtccatgcgtagaatacgagcatttggaatcagctcttggagttctgcttcgactttttgtgttcccgttccaaaatagcgaatctggcgactctgacaatttggacaagtccgcggaattgcttcttcatgaccacagtaatggcacttcatcgagtgcgtatccatatgcaacgtgagtgagatatcacagttgggacactgcaagacaaagccacaatcgcgacacatgataaaggatgaaaaaccgcgccggttcaacaagaggacactttgttcgcctttttgcaaccgatccttcaacgcatctaatagtgcaggtgaaaagttgctgctggcttgttgcttcatcgcctcgcgcatatcaaccaactcaactgccggtaatggctgttgattaatccgttgcgtcaggcgcaagagttggtagacgcctttttgggcgcgggcacgcgattcaagcgacggtgttgcactcccgagaatcactgggcaatgatggtactgactccgccagatggcaacatcgcgggcatgatagcgcggactttcatcttgtttataggaagcttcatgttcttcatccatgataatcacaccgatattctccaatggtgcaaaaacggctgaccgcgccccaacgacaacgctggcttctttgcgttcaattcgccgccattcatcatacttttcaccttcggataagccactatgtaaaacggcaacttgatcaccaaagcgacccttcacgcgtttgaccatctgcggggtcaaagcaatttcagggactaacattaatgcagttttcccctgttgcaagaccgcatcaatcgtttgcaagtaaacttcggtcttaccgctgcccgtaatcccttcgactagaaaaacccgatcagattgggccttagtagccgccacaacggcttctaccgcatcagcctgttcatcagtcaacgccattttttgcgtcgtcgtgacggttttaggataaggatttcgataagcttcaactttaacttggcgtaaccaacctttgtcggcgcctgtcttgatattctcccgggtaaaagtcgtcttggtcaaaacatcctttaataagggattgggttgatcaattaaactttgtaaataactaatgagttgactctgcttttgcgctgacttacgtaagccggtccgcgcttcttctaactgttcaaacgataatgccggttcaatcgccgttaattgcttcacgcgggcgcgatcatcgacatggtagaccacttcgattttcccttggcgttgtaactgcatcaattgttttaacttttcgggatctagcgactggtcaaacgttaattcgtcgttaccattgaacaggcttgcttgtaaggctggatcaatttcatcaactagttgcgcggtcttagagtacttagcacgcatcacacttgggagcatcgtttgtaagcacgtaatctgaaaggcataggtccgctctgccaaccaacttgataattgaagtaattctgaattcacagccggttgtaaatcaatgaccgccgtaatcggctttaattgcccctcaaaattggcttgatcttgaatggacaagataaagccttgaattaatcgatcacctttgccaaaaggaaccgccacacgcatcccaggttgaatactgtctaataaagtatccggtacttggtaatcgtatggccgattagtttgcatcgtcggcacatcgacaatcacttttgcgatttgtggcatctgaatcctcctttttagttaagctaacaactcagcaactcgttctagaatttgagtcgcaatcacacttttatccgccaacgctaatgtttccggtactgcattcggttgtaaaagcgtaaccgcattttgatcaacaccaaagccccgatcatgctgactgacatcgttcgccacgagtaaatcaacatttttagctgctagtttggtttgggcatgttgtagtaaatcatctgtttctgccgcaaaaccgaccaagaattgatgcgtcttctgttgcccaagcgtcgccaaaatatctggggtgcggtctaaagttaactgcatctcagttgtgttcggttgttttttgattttgtgcgtgacatattgggccggtttaaaatcggcaaccgccgcagccatcaccacaacatcggccccttcaaagacactgctaactgtgccttgtaattgcgccgccgtttcaacgtaaattattttgtgcaaaccagccggcactggcaattctggacgcgtactgatgaggatcacattcgcccccatcgccacggctgcttgggccactgcataccccattttaccagaagatcggttgccaatgtagcgtaccggatcaattggttcttgtgtcccaccggcagtcaccaccacgttctgcccacttaaccgttgcggtccgaattgttgcgcaacttctgccataatcgcggtttcttcagggaaccgcccgacaccagcatagccttccgctaaaaagccggtatccggttccatgacagtatagccatctgctttaagttgggttaaattccgttgggtagctggattaaaccacatatgttcattcatcgccggcacaattaatttgggcgcggtagtggctaacaaggcggtcgagacaaagtcgtcagcaatcccattagcgagtttcccgattagattagcagtcgccggagcaatcaccgccagattagtccaatccgctaagtgaatatgggcaacccgatccggttggtcttgattaaacaaatcagttaacacgggtttacgcgttaatgtggcaaacgtcagtggcgtgacaaattcggttgccgcctgagtcattgccacttggacctcagcacctgctttaatcaatccacgcaccaaattagccactttgtagacggcaatgccacctgtcacataaactgcaattcgtttattcgttaaatccactttcaaaaccccctaaaactaaaaaaactgcactttaatttaaacatccatcgatgaataaactaaacatgcaggttctttaattattcttattcgctgtctttttgagcgagcttatccattttttcagcatctttttcaagcatcaatgaatcaggatcaataatgacattgccagcaacaatttcttccattgccatcccaaccgttttaggtgatttgtattcagataacatcttaatatcaccggcttcgatttcatgggcccgcttgctagctaaaacagccaatgagtaacgtgagttcacgttttctagtaacttatcaattgaaggatatacaatcatattattattcccctatcattttcttgtattggtcgatcacacgtggcactcgtaagtgttcactttcgataatcttttcgattcgttgaaccgcatttggaatttcgtcgttgacgacagcataatcgtaattttccatcatcttgatttcgtcggctgctttttgcatccgcttatcaatcgttgcttgatcgtctgtgccgcgtttttgaattcgattccgcaattctaataaatcgggtggtgtcaagaagatgaagacgccatcgggacacttctcgcgcacttgcattgcgccttggacttcgatttctaataaaacatcgcgccctgagtctagtgtctgattcacatacttcatcggtgtgccataataattatccacgtactgtgcatactctagcataccatcatttgcaatttcttgctcgaattcttctttgctcacaaaataatagtcaacaccatcttgttcgcctggtcttggccttctcgtcgtcatcgaaactgaatagtgaaaatcacgaaattcatcttctagcattgcttgacggacagttcctttaccgacccctgatgggcctgataaaacgatcaacattcctcgattggacatctacgtaattccctcttcttttataaaatagttaaagtctattctgcactatttggcgggaaatttcaagtctactttgtttccatctcatttaaaattaaccttaaggacgcaatttcgtcgtttgacagcgtcacacccttacccattttggcatgatccggtgcccaatctcgcaaatcaaattttggtgcacgttgattccaagagattaaattcaattctttacgccaaccagctggattttcactcaacacaccgatttctgccataatttcatattcaattttgcccatcaaatcaccctttctatcagttcatcctattatacacgaaaaaaatcaaaaaatgccgcttgcaattctgaacgtttgttcgtataatgaaaacacaaacaagtgttcggaggatgaaatcatggaatttaaacaagcaacggttagcggactcagtcaacaattggttaaacaatatcaccgcttttttgaacttacaccagaagcgactgcttttgttgaacaaccccaaatgcaacctgctcagattcaattatttatgacccaagcgtttgaacgccactaccatgttgcggtgcaattcaatgttaacgatcatctcgaacaagtgaccgggcgcttggttaaacaactcagtgcgaacaagtatctgctaaaagagagtcgttcgaacctctacaagattgtcctttgcaatcaaattcgttacattcaaaagaaaaattaagcaaaaaaataagggtgcagccaaaaaaatattttggctgcacccttattttaatgtcggcgactttgcttagccgtttccgctaatgccaccaattcttcggcatgttctaaagttaactctgttacttcagtccccgctaacatccgtgccagttcagcaatccgttgtttaccggttactttttgaacggacgtttctgttcgattttgtttcacttgtttttgaatttgatattgatgatcactcattgctgcgacttgcggcaaatgcgtaatgcagagcacttgcgaatgttggccaatttcactaatcttattggcaatcgcttgggccacacgcccactcactccggtatcaacttcatcaaagatgatgctagtaacgccttgtgattcggagaaaatcgttttaagggctaacatcaagcgcgataattccccaccagaagcaattttagcgagcggccgtagtttttcaccagggttgggttgaatgtaaaattcaactttgtccatcccggaagccatgaactgttcctgttcatttggcaagaattcaactttaaagaccgtcttttccatgtataacgcttttaactgttgatgaaccgctttttcaagttgcttagctgctttttggcgtaattgcgtcaacgtttgtccgtttgtcctaagttgttgttcaagttgcgtgaattgctgctccaactcacttgcgttcgcttcagttgcttgcatcgctgctagttcagccccgattttttcaccataagcgagaatttcggcaattgaatcaccatacttatgttccaaattattaatagtttctagccgttgttcgatttcatctaaccgtgcttcatcccattctaagtttgaaacttcccgactaatatcaatgctactatcttgcaacgtgtaataaccagtctgcagactgtccgcaatacgcttgaattctggatcgagttcagcaatttcttgcatctgattcattgcaactgcgatttggtctaacgcattcccgtcttctcctgctaaaatcgtgtgactggcttgcaatgcttggttaattttttgaaagttcattagtttggctcgttcttcgactaacttgctttcttcatcagcctgtaattgggctgcatcaatttcgttagtttgaaatttcagcatatccaagcgttgcgcccattcttgttcattttgctgtttttgcttcaaggcacgctgtgttttacgataggcagcataagtttcggcataggctgccttcgcggttgttaacttttgatgcgcaaattcatccaacaaccccaagtggcgatctggatacattaattcttggtgttcattttgaccgtgaatatcaactaaggtttctccaatatgcttcaaagtggttgtattgaccaaatgaccgttgacccgacaaacattgtgtccattaacggctaaatcgcgctgtaacaagacggtttgttcgtcgtgttcaatgccaaactggtctaatactgcggcggttgtgccattaggcgtcatcgtaaataagccttcaagggtcgcttttttagcaccagtccggataaagtcttgtgaaccccggccgccagcgagtaacccgactgcatcgataataattgacttaccggctccggtttcccccgagagcaccgtcatcccttcttcaaaactaattgctaactgatcgataattgcaaaatcgtgaatgaccaactcttgtaacatctgatcatccccctttcgtttctcttgatgctaaaaaaacttgccaaattactttagcaagtcttcaataaacttcgtagactgtttagcattttcttctgatttacaaatcaccaacacggtgtcgtcgccgccaattgtaccaaatacaccactgagctgcatttgatccaaaagattagcaattgccgtcccgttacccggtaaggctttaatcacgacaaaatagtcttgttggttatgcgtaatataggcgtcgcgtaaaatccggcgcaacttttctttaacgtctaatttcttttcaggcggtaggctatagtgatagccctcgtccgcatttggcactttaatgagctgcatttctttaatatcccgcgaaatcgtggcttgcgtaacatcgatgtcttccgcttgtaacagcttcacaaaatcctcttgtcgttcaatctcatgggtctggattaaattttttaacagtcgttgccgatctaccttgcgcattaaaacaccctcttcatgtgagaaattattctattcctcaatgatagcgcatttatacataaaatacaaagttttatacactattttcccgttggtcgtttcaaagcagcataggcattctctaaaaccgtatcaatattcacgttttgggccatcgttccagtctcagccgtcgtattccgtagatgaatcaagaattcaatattgccttcgccacctttaattggtgaaaaatctaaccctagcacgtcgtagcctgtcgctaaactaaaatcaacgatgtctttaaccaccatcttatgcactttcggatcacgcacaatcccgtgtttaccgacattttcagggccggcttcgaattgcggcttaattaaagcaaccgcttcgcagtccggtttcaagatgggtttcaacggcaccaaaatcttatgtaacgaaataaacgaaacatccgtcatggcaaaatctggttgaccattggtgaaatcttctggttgactgtaacgaaaattaacccgttccatcacgacgacgcgtggatcttcgcgcaatttccatgctagttggttatagcccacatctagtgcgtaacagagtttggccccatttctaagcgccacatcagtaaagccccctgttgaagaaccgatatcaagtgcgattttatcctgtaaatcgatgttgaaaacctcgaccgctttcgccaattttaaagcccctcggccaacatacggaatcttacgccctttgacacttaagacagtttcagcgtcgattttttcgcccggtttgtcgattcgttcatcatttttaccgtacacttcaccagccatcacagaccgttttgcttgttctctggaatcaaataatccctgttggactaataatacgtctacctgttcttttttcatctgttctcctattcattaaaatagtttaaaaaactatttaatagtgctttatctaacccggataaatccgttaaagcagtttgcgcggcctgataagtctcatccaacgcgtcttttgcaccggctaagcccaataagcctgggaaagtattcttatgttcgtcagcatccttatggaccgccttgcccatcgcttctgtagtgcttgtcacgtctaaaatatcatcttggatctgaaatgccaacccataattttgcgcaaaaagctgtaaactagccatttgttcatcggataaatcagccaaaatcgcacctaagccgaccgcgcattcaatcaaacggcccgttttgagctgatggacttgtttcaattgaactaacgataaagttttagtttgtccttcgatatcttcaatctgaccagcaaccatgccacttggaccggctgcttgcgccaataatcgaacagcgcggctctgctgatcagtcgtcaaatcggtcgtcgttaaccattcaaatgcaagtgtcaataacccgtcgccggctagaatagcttgcgcctcgccaaaaaccttatggttcgtaggttgaccgcgccgtaagtcatcattatccatcgccggtaaatcatcatgaatcaatgagtagctatgaattaattccaatgcccccgctacgcgatacgccatttgattaatcggtcgccccgcacttgcaagcaccgcaaataccaaaagtggccggagacgtttcccgccagccatcactgaataggtcatcgctttttgcaaggttggttcttcaatctgagcaagttgctcagtcaaataggtttcaaatgcgggcacttgttggcgtgcaaacgttttgaaatcaaccattattcttgtgcctcagcatccaatgggacttcttcgccattatctgccatcactttggccatcgttttttcagccttacttaaggtttcttctaatgtttgacttaatttaacacccttttgaaaagcagtcatcgctttttcaagtggcacatcgcccgtttccagttcattcacaattgcttccaattgtgctaagttctcttcaaatgttaatttcttttctgccatcttattcgtctcctttatgagtggccgtgacacgcgcgttcacgaggccatcttggacatgtaactcgattgattggtcgaccgtaaaatcggtcatttttttcattacattttggttatcatccgttacataagcaaatccgcgtcccaaaattttcaacgggcttacgagatccaaggccgccaccgcttgtccagcctgttgccgccgattttggacaaggctctcgattgctcgtttcaaacgatgatcggtatcagtcaacattctttgtgcttgttgaatcgcaccacttggtgattgcgactgcaggcgttgctgcaagagttgtacattctgttgactagtctgtaagcgttgttgttgcgccaacaataaacgacggtgcaactgatcgacattttgtaaatagccgtcatacaagcgttgcggctgttttaagacgtaactgttctgtaagtggaccaattgctttttgtttaatgccaatgttttcgaaaatgcctgatataaccgcaaacgttgttgttgcaacttcaacacttcgtccgtcaaaaccggtgttgctaattcagctgctgctgttggtgtcgctgcccggacatccgccactaaatcagcaatagtcgtgtccgtttcatgaccaactgatgaaatcaccggaatctgactggcaacaatcgcgcgcgcaacgcgttcttcattaaacggccataaatcttcaatcgaaccaccaccacgaccaatgataattgtatcgaaatccccttgttgattaacttgattcagtcgatcgactaaaatatcagccgcaccgtcaccttgaaccaccgctgggaataagacgagttgggcaattggataccgacgttgcgtcgttgttataatatcgcgaataacagccccagaaggactcgtaatcaccgcaatccgttttggaaagcgcggcaatagttgctttggtgcatcaaacaagccttcagccgataatttagcttttagctgttcataggcttgatacaatgcaccaagaccatctggctccatccgttccacatagatctgatagtttccagttgcttcgtacaaggaaatccggcccacaacaagcactttcatcccctcttcaggagtgaacttaatcttttcaaaagcggacttgaacataatggcactgatcttagctttattatcttttaaactaaaatattgatgcgcattcggtcgtaagcggaagtttgaaatttcgccggttaaataaacccgatccaaatacggatcgcgttcaaatttagcctttaaatactgcgttaatgcggtgactgttaaatagtctgttggtttaaccacgtttagcacgttcctttgcaatctcaatcgtttgatccatgagcatcgtaatcgtcattggccccacgccacgcggaactggcgtcatcgcactaacatgtgatttaagggcttcaaaatcgacatcaccggtgactgttccatcttcaagccgattaatgccgacatcgacaacaaccgccccttctttgacatcctcaatgccgaagaagtgtggtttaccgatggccgccactaagatgtcggctgttttcgttagggcttttaagtctgccgttctgctgtgcgcaatcgtgaccgtggcattggcattgagcatcaaggctgccaatggccgaccaacgatgttactccgaccaacaatcacgacatttttgccagccacgtcaatatcgtgagctgccaataagcgcataatcccatttggcgtacaggccactaagcccggttgattaagccataatcgcccaatattgactgggctaaaaccatcaacgtctttttgtgggtcaatcgcccggataatatggtcttcattaatttgttttggtaatggtaattggactaaaatgccatcaacggtttcatccgtatttagttggcgaacaaccgctaataaatcagcttccgttgtttcagcagacaggcgttttaactcagatgccatgccaattttagtcgctcttttttgcttgctttgcgtataaatcgcacttgctggatcatcacccaccatgacgaccactaatttcggggttaccccttgttgtttgagtgttgccaccgccatttgttgtgcttgtgttaattcatttgcaagtgctcgaccatctagtaattccaaagttaacaacccctatttatcgatatttgatgtttctatttcagcatagttaatcggttaattccgggttatcagctgataatgaccgtttaaattcaaaaaaacacgctaaaaaaatactttttaacgtgttttaagtgatttcgttcgtattttactaattaagcttcaacgaatttagataaaacgccgttgataaaaccttttgcttgatcatctgtaaattgtttagcaagttcgagcgcttcattcaacgccactttatcgggtgcttctgttgaattttgcatttcaaacaaccctaaacgcaagataattaaatccggtttggctaaccgtgatagttgccagcccttcttcaagtatggcgttaaagcggcgtctaattctgcttgatgttctgtgacgcccgttaccaagaaggcaaggtagtctggaacagcaacttcttcaacttcttcagcatcgaattgatccatggttaaaacggcttggtaagcatctgccaattctaatgtgtcattagcatttaacgcaaacaacacttgaaatgcagcttggcgaatttggtgtcggttaaaattaggcattaagattggtctccattttgatcaggtgtttcatcgttaaataagtcatctggatcaataatttttggtgctttttcagtgacaacgcccaccacgtgtacgttgacttctgctagttctaaatcagtcatgaacaataattgttctttaagggcttcttgcatcgcaagggcaaccttcggcacagaaacaccatagttcagataaacataaacatccgcattcactttgccatcaatcaccttaagagttacccctttaccgtgattcgaacgaccaaacaattcgttaatggatgatgataacgtcccccgcatttggtggaccccatcaatcttgcttgctgcaatccctaaaatcacttccacaacttcaggtgccatttgaatcttgcccaatgcattttcttgtgtatcaagtacaatatttgtttcttctgccatcgaaacccctcctaacaagttcttgctaatttagcctatgcccgtgagatgtaactcccatcagatgtgttaatcgttaacaaatcaccttcgttaacgaaaaacggtacttggaccactaagccagtttcaagtgttgctggtttagtaccacccgaagatgtatcaccacgaacaccaggttctgttgcagccactgctaaatcaaccgtgtttggtaattcaacccctaaggtttcactaccatacatcatgatagaaacttgcatattttctttcaagtatttcaattcatcattgatttgtgctgctggtaattctaattgttcgtaagtttcagtatccatgaagacgtggttgtcaccatctgcataaagatattgcattgattttgtatcaatgattgctttttcaactttttcagttgaacggaatgtcttttcttgattggcacccgttcttaaattcttaagttttgagcggacaaaagcgccacccttacctggtttaacatgttggaattcaacaatccgccataggttgttgtcaaattcaatggtcaagccatttttaaaatcatttactgataacattgtttatcctccgagcattatataagtatgccattgtcctaatcatagcaagaaatcaggctcaaaagcaagtatttctagccttttatccctaaaagtagctataaaaaaagggaccggcacccgccaatcccttttagcgtattcaatcgagcaaaagtcgatctgaacactcacttttagattgtcaatggtttgttgcctgagtaattagtataccagtaaaactggatttacacaaacagagtgtgacatcagtctgggatatctcgaggattaaccctgagtcgcaaaagattgtggaacaatcatttgtgactcagggttaaccggagagatatgactgatggaacacgtttagaatgtgacgacagccccgcttctctcgcacaaaaaaaacacccacataaagtgggtgtgagaaaaattatttagcttctgcagcgtatacagaaacctttttcttgtttttaccgaggcgttcgaaacgaacgacaccttcgataagagcaaataatgtgtcatcgccaccgcgaccaacattttcacctggatgaatctttgtaccgcgttgacggtaaagaattgaaccagctgttacagtttggccatcagcacgtttagaacctaaacgacgacctgcagagttacggccgttagttgttgaaccgccacccttatggtgagagaagaattgtaaattcatttgtaacatctaaatgcacctcctgtttattaactgtctatttacgttttgtttgtacttgaatgtactgcccgtattgttgcgtaatatcttcaagcgtcaactgcaaattctgcaagagaatctgagctgtcgctaaagcttggcccgaaaccgttgccggaatctgacaagttaacaaaccaccattcaggttatctgcttctacctctggttcaaaaccagcaagcttttgcaaactgttgattgtcccgattgagacagcagaaacagctgcacagacgatatcactcccgtaaggacccgagtcggcatgacccgtaatttgaaaagaaataatttgcgaatcggcattgaccgtaaagtcagcttgaatcatcttatttccctcaattaggcgttgatagcgtcgatcatcactttagtatatggttgacgatgacccttcttttgatgactgtgtttcttaggtttgtatttgaaagtaacaactttcttttcgcgcccttgtttttcaacagtaccatcaacagtaacaccatcaatgtttggtgtaccaaccttagttgtttcaccaccaactaaaataacttgatcaaaagttactttttcgccagcttctgcggctaacttttcaacgtagattgcttgaccagcttctaccttatattgtttgccacctgttttgataattgcgtacatgtgtgcacctcctattttttcttagactcgccaactaaggtgactaatcatagtacttaatgccttagtatgcgcggttgcagctgtggagctcacaattacaacgttcatattatatcgaatatcacagggcgagtcaatgctttattacgcctcgacaaaaaattgtgcgacatcaaacgtcgtattaggtgtttgtaccaattggtataacatcttagccatgtagcgtggtgaatacacaagcccgtcattgacccacttaaagaccaacgctaaactggccaccgctaaataatcaatcgtaatactcatctcaatttgatcagcctgtgaagtctgattatagcgtttagccacgtaatcctgcattaattggcgcattgattcagtcagttgtgcctgaaagtgaagcgtcgcctcatttttatagaacactttaaaagcagcttgttgttgttcaacatattcaaaaagtgcctgtaaactgacctgacgatatgtctgatcgaccactacagtcacttgctgataaaaatcggccaccaaatcggccaccgcggttcggatgaaatccactttatcttcataatggagataaaaggtcccgcgagtaattgccgcttgcttggtgattgcttgaatcgaaatcccctttggtgtactgtctttcagcaagataatgagggcttgacgtaattgttgctttgttcgttgaacacgtggatcttgtgctcgtaaatctgtctcacgaaccatctgatagttcccccaatcttttaattaaattcacctgtcaatagtatagccgctcagtgaaaagtctgtccattaatcggcttgataacggcccttgatcagttgaatatcccctagtgtacactgtaaatttgaagattctgttaacgaacacccaaaaagtaaactttatcccccacaaatttaattgttgttcgtctgcggttatagtaaaatgagcgtagtatttcaaatcggatagcgttaggtggtcgtcactttgatttctgcattcttcattattttcatttcaatcgttttattcgccgtcattgctagtcaattgactttcaaaatcggcttaatcacaaattgcgtgctctttatcattttagttggtgttgatgcttatctattcagctggggtagtggttctcactgggtgtacgttattgtcagcctactcggattagtcgctagcgaattattattagctgaactcccccatcttaaataattaggttaacgtcaaaaagcggtccaactcatcattgagttgaaccgctttttttagtgcccctgccaaggactctcagtataccatattaatcaagtaaggttgtttctttcacttcatcaattgtcttggtaccagccaactgcatggtaatcgataattcatggtttaagtgttcaaaaacagattgtaccccttgggcgccacctaaatttaaaccataaataattggccgaccaatggccactaaatcagccccacttgcgagtgctttaaagacatgttcaccacggcgaataccactatcaaaaacgattgggacgcgttttgcgacttgttgcgcaattaaaggcaacacttcaaatgaagcaggcccgccatctaattgacgcccaccgtgatttgaaacccagatgccatctgcaccagcttgaatggcaatttcagcatccactggtgattgaatgcctttaacaaagactggcaaatttgtgatttgtttaatcttttgaatatcttctggtactaatccttgtttagcggcagcataaatttcagagatgcccttcccagcaccgtcagaattactataagctgctaaattaggcattggtagtgggaattggaattgcgtctcgatgtccgcttcacgataaccacccaatgttgaatcgacggtgagaataatggcttttacacctgccttaacggcttttttcaataagaactcattgaattgatcatctttactcatatagagttggaaaaattgggggggcatcaggagccgctgcggctgcatcttccaccaatgtattggcataggtactaattgagaaaatcgaaccagccgctgcgacccctttagcagtgtcgacttcccctttttcatgtgctaacccttgggctgctgagggggcttgaataatcggcgtttttaaatcaatatcccataatttagtatgtaaatcagcatgatcgatgccttttaacacacggggcattatttttttagtattgaaagcactggtattttcagccatcgtccattcgtcttcagcaccgccacagatatagccaaacgcgccagcttccattcgttctttcacgcgtccttctaacgacgctaagtttaaaatatcgattggattttccgcttcacttgtatgatatcccatgatagattccttctttcaataattgaatacctttatcatggttctcttatcaaaagtaagcaaacatttatactcggttatttcacttgcgttcgaaatccaatgtcttgccggtaaaaagtcgtcggtaaagcgagttgcgctaaatcccgatagacctgttgactagctccgcctagcgtctcagcagaataactagcggtatacaaacgcccgccagcgctgaccaattgattggcttgttctgcgacactagcgaaactaaatgtgctgttgcgttttgcaaattgttgcaaagtgggtaaaacaaacggcgttgtcgattgtgtcgggtaaccatctgaagccaccacaacacctaacgtaatgcctgataattgccactgtaacgttggggtttcccccttcaataattgtgcaaaaacttgggcccagtcgcccgtcatccgtggtagcaccacttgtgtttcaggatcaccaaagcgcacattaaactcaatcactttcaccctgtgttgtgtggcaattaagcccgcatacaagacaccggtaaaaggcgtttgacgttcagccatcgttgccacaatcggttctaaaatagtcgttaccgcttctgcaacgcattggtcactaatctggggtactggacaataagcgcccatcccacctgtattaggcccacgatccccgtcaaaggcgcgcttatgatcttgagcaaccggtaatggatagacgcgattattcgccaccaacgccatcagcgagaactcttcaccttcgagataatcttctatcaataactggggcacgccctgttcaaagaacgcctgaacagtttgccgcgcgctcacgtcattttgagcgatgacgacgcccttgccagccgctaaaccatccgctttaatcacaacgggataacgaacgtcatcgagggcatccagtgccgcttggacagtctgataggcttgataagccgccgttggcacatgcgcggccgccataatttctttggcgaaagttttagacccttccaatgccgcagctgctttacgcggtccaaagatcgctaatccagcgtcttgaaaagcatccactacgccagccactaacggttgttcaggcccaacaatcgtataggcgacctttttggcctgcgcaaaggcaatcatcgctgcaaagtcagtcatctcaatcgcaactgtttgaatcccatccaattgcatccccggattgcccggcaaacaatagaccgttgcaacagttgaactctgctgtagcgcacgcgcaatcgtgtgttcacgcgcgccgctaccgattactaatagatccatgatttgcctcctattggctagtgtttgaaatgacggcgaccagtcgtcaccatactgattcctttttggttggccatgtcgattgaatcttgatccttaatcgaaccaccaggttgaataacagctgtcacaccatgttctgcggcgtattcaacgctgtcatccattgggaaaaaggcgtcagatgctaagacgaacggtgcttttaatccattggcttccgcttgttcgattgcaatcttcacagagcccacccgattcatttgccccgcaccaatgccgagggtttggtcctttgttgcgaccacgatggcattactcttaacgtgtttaaccacacgttgggcaaataacatcgcagcttgttcatcagccgttggtgttttgtccgtcacaaccttcaattcagatgcttgatcagtcacccgatcacgttcttgcacgagtaagccgcctaaaacagaaaccatttcgaagcgatccgcttgcttagcagcctcaaaatcaagcgtcatgacgcgtaaattcttcttcttttctaaaatggctaacgcttctggggtgtagcttggtgcgatgataatttctaagaataaactgtgtaattcttcggctgtttgaacatccacttcacgattcaaggcaatgatccccccgaaaatcgatactggatcggccgcgtaggctttttgccaagcttcatagatggttgcacccaagccgacgccacacggattcatatgtttcatcgcaaccacaaaaggttcgctgaattctgcgaccactttaaccgccgcatccgcatctttaatgttgttatacgataattctttcccgtgtaattgtaccgctgaggcaatcgagaaagccgttggtaaactgctttgatagaacgctgctttttgatgggcattttccccatagcgcaacgcttgtttaaagtcgtatgaacgtgttaatttttcagggaattcgatgccgactgcttcggttaaataaccggcaattaagctatcataagctgccgtgtggcggaatgccttggctgctaaataacgacggtaatcaactgcagcttgcccctcatcgacgacgtgttcgaggacttgcgcgtaatcttgttgatcaacgaccacgtacactgatttgaagtttttagcggcagaacgcaacattgaaggtccgccaatatcaatttgttctacagcttgcgcttcagtaatccctggtttttgaattgtttctttaaaaggatacagattgacacaaactaaatcgattgtctggatgtcatgggctgctaaagcggccatgtgtgttggttcgtcgcgtttggcaagcaagccaccatgaatattgggatgaagtgttttaacccgtccatccaacatttctgggaaatgagtgacttcatcaatcgcaattactggtacttgcgcttcttgtaataccttgaatgtcccgcctgttgagatcacctcgtaaccagctgctattaatcctttagcaaattcaataattcctgttttatctgaaacactgaccaacgctcttttcattgattgaattactccttctattttggtttttaattaattcagcaacaacttgcggataaatcgcgtgctctgtatcgtgcacgcgttgttccaatgcggctaaactatcgccaggcaacaatggtacttttgcttggacaatcatcggaccgctatcgacaccttcatcgatgtagtgaatcgtaacgcccgtttcagccacttgtgccgcataggcccgttcaatacttcgtaacccagaaaaggccggtagtaacgatggatgaatattgataatccgttgtgggtaggcatgcaacaatactggggtaatcacccgcatataacctgctagcaatatataatccaactgtaacggtgccaacagcgcgacaattgctgcttcatagtgttgtcgatcatcataatcacttaagcggatgaccgtcaccggtacatttcgttggcgcgctttttcaatcaccggtgcgcccggctggtcacacactaaattcataatctccatgcccgctttttttaaggcgtcatcatctgcaagtacttcaaagttagaacccgttccagaagcaaaaatcgccactttcatctcatcaacccaccaattctattgcattttcttgtcgcggtttaaccgacccaattcggtaagcttgttcttgttcagcgttcaattgggcgaggacttgtgccgctttttctggtgcgacggctaagaccatcccgatccccatgttaaaaatgttatacatctcgagtgcatccaattgcccatattgtttaagtgccgcaaaaatcggtaagcttggccatgttcccaattgaatttcggccatcacgttgtcaggcaacatccgcggtatattttcaataaagcctccaccagtaatgtgggccgcgcccttaataaagccttgttcgataaacggctgacatgcttgtgtataaatccgcgttggtgttaatagccattcaccgagtgtctgaccaggcaattcgggtaagtgactgtcgacggacaacccatgttgttcgaagaaaatttggcgcacaagtgagtagccattcgaatgaatcccactggacgcgattccgattaatacatcccctgtttgaatcgtttcaccagtaattaattgagcttgatcagcaattccgactgcaaaacccgctaaatcataatgtttttcagcatacatacccggcatctcggccgtttcaccaccgattaacagcatgtcagcagcttggcagcctgcaacaacgccgctgacaatttgttcgatcttatccggctgcgtttgaccagccgctaagtaatctaagaaataaagtggcttagcgccttgggcaacaatgtcattgacacacatcgcgacacaatcaatcccgatggtcgcgtgtgcatcagctgcaaaagcaaccatcaacttggtcccgaccccatcggtacttgaaacgagcaccggattttcatactgccccatcgctaaggcaaactgaccaccgaagcgaccaatattttgattggttgcgccgacctgcttttgaatccgacgaaccacttcgtaaccggctgtcacatccaccccggctttttggtaagcatttgtcatgattgttgctccttatctgcttttaaacttgcctgataggcagcttcatagtcataaagtggcgttggatagtcgccgttgaaatacgccatacataatccggaatacggcgcatcttgctgtaacccaatcgcgtcgattaatccctgttcactcaaaaagccaagtgaatccgcgccaatcgtggcacacatctcagcaatactttgatgcgcggcaatcagttcatcacgtgtttgaatatcaatcccataaaaacaagggtacttcaatggtggggacgcaatccgcaaatgcacggataatgcgcccgcttctttcaaacgtttcacgatgtgcttgctggtcgtcccacgcacaatcgagtcatccactaaaacgattcgtttaccagccacaacacttttaaccacggcgagtttgcggtttaccccttgttcacgaagggcttgcgttggttcaatgaacgtccgccccacgtattgatttttaacgaggcccatttcatacggcaaaccactttcctcggcatagccactagcggccgataacgatgaattcggcaccccaattaccatatccgcatcaactgcggtttcgcgtgctaactgtttccccattcgtttgcgggccgcatggacgttaatcccacagatatcagaatccgggcgagcaaagtagatatattccattgaacagattgaatgcgtggtttcggttgtgaagaagtcagaatgtaacccgtccgcatcaatcgtcacaatttcgcctggctgcacatctcggataaaagttgcttgaacggtattgagcgcacaggtttcactggccacaacgtagcccccgtttgctaaacgtccaatcgagagtggtcgaaagccgttgggatcaagcatcgcaatcaatgaatcttgcgttaataataggtaggcaaagcccccacgaatttgttgaagggccgtcttaatttgcgcgtgcaaatcaggcccttctgcacgtcgaatcagatgcatcagaatttcagaatcagagctcgattttaagatggcccccgattgttcaagcatgcggcgcagtgtgaccgcgttggttaaattaccattgtgtgcaagtgcgaattgatcggttgcaaaatcgaataggaacggctgaatattttctaaaccgtgactaccagcggtcgcataacggacatgaccgattgccgcgtccccggttagttgggttaagtgctccggtttgcggaaaacatccgccaacaaaccacgattgcgataacccattaagtgcccgtgatcattagtgacaatgccggcaccttcttgcccacgatgttgcaaactatgcaagccaaaataagtcatttggtttgcttctggactaccccaaatcccaaaaacaccacattcttcatttaaactttttatttcatttgacatggtatcgccgtctcccaacttaacttcgcttcagtcaccgataactcaacagttgattcagtcgtttgcacttgcataattggcgtggccgagaccgtcccaattaattgcgcctgatcttgacagaacgcttcaaacgccgtctgattttctggccgaaccgtgatgataaagcgggattgcgcttcaacaaataactgttgttgattaagggggacttgcacgcggcagccgagttgttctttaaaagtcatttcggctaacgcaaccgcaaaaccaccctctgataaatcatgtgcgctagtcacccagcccttttgaatcgctgctaagacgcaatcttgactcgctttttcagtggctaacgaaaagccgcttaatcgtcctgcaactttgcccgtcaacatcttttggagttccgaacccgctaaattcgtatccgtctggccaacgaggtagattaaatcccccgctgacttaaaatcttgcgtcgtgatgtcggctgtatctcgaatcaaaccgaccatcccaatcatcggtgttggataaatcgcttcgccattgaattcgttataaaaagaaacattaccagagatgaccggcgtatcgaaaacctcgcaggccgccgcaatcccttgggcactttgatcaaattcccagaatacctctggcttttccggattgccatagttcaaacaatccgtaattcccagtggttggccccctgccgcaacgatattccgtgctgcttcggcaactgccacttgcccaccgacttttggatcgaggtataagtaacgcccgttacaatccgtcgtcatcgcgagcgcttttttagtcccacgaattcggacgaccgccgcatcgcttcctggtaaaacgacggtattggtcttcacttgtgcatcatagtggctgtatagcgagcgtttgtcagcaatcgtggattggcccaataaatcgagccatgttcgtttaacatcattaatcaccgactgataaggcgccatcgctttaaattcagcgatgcgtgctggttcagtttgtgctttatgataaatcggcgcatcactcgttaaagccgccactggcaaatcggccactaattgcccaccatgccacaattgatattgttgactctcagtcacttcaccaatccggaccgcatccagatcatatcgttcaaacaaggcaaccacatctgtttcatgaccagctttaacacaaagcgccatccgttcttgcgattcagaaagcatgatttcataagcggacatctctgtttctcgttgtggcacaagatcaagattgagaatcatcccagtacctgccttttcagccatttccgctgttgaagaaactaagcccgccgcacccatatcctggatgccgactagccaatctggatgcttcaaaattaattccaaacaagcatccattaatagtttttccataaacggatcacccacttggactgctgagcgttgggtcgccttgccatctgcaaattcatccgatgcaaaagtggccccgtgaatcccatcgcggccggttttagccccgacgtagaacacactattgccagcaccacgcgctttaccttgctgaatatccttttggtcgatgacaccaacgcacatcgcgttgacgagtggattagtctgataacatggatcaaatccgatttcaccaccgaccgttggaatcccgatacaattaccgtacccgccgattccagccacaacttcttgaacaaggtatttcgtgtggtcatccgtcagttcaccaaagcgcagactgttcaaaagcgcaatcggcgtcgcgcccatcgaaaaaatatcccgaataataccgccgacaccggtggccgccccttcatagggttcgactgctgagggatggttatggctttcagctttaaagaccactgcttgaccatcgccaatatccaaaatcccagcgccttcacctgggccttgcaacacgtgctgaccacttgttggaaattttttcaaaaccggcttcgaatttttatatgagcaatgttcactccacatcactgaaaataacccggtctccgtataattcggcaaccgttttagaattttagtacgaatcaattcatattcatcatctgataacccccattgctgataaagcttggtggcttggatttctgccggtgttggttgctttaacacggttattgccctccttttcgaatcgatgtgattaatgctgcaaataaacgttgcccatcatcgctacctaataaggtttcgactgcgcgttctggatggggcatcatccctaagacattgccggcttcattcgtaacgcccgcaatattcgctaaactaccattcacatcattttgataagtaaatgcaatttggtggttcacttttaaccgttccagggtctctgcatcgcaataataattcccttcaccatgagcaatcggcaaccgaatttgttcgttcggcatatagtgttgggtgaacatcgtaccggcattggtcacgttcaacgcgactgtgtcacagataaaatgggtttgtcgattcggcaaaagaacgcctggtaataacccgagttccgttaaaatttggaacccgttgcaaataccgataaccggtttgccagcagccgcaaacgccttaactgccgtcataatcggtgccaacttggcaatcgcaccactgcgtaaataatcgccgtatgaaaagcccccgggcactaatacggcatcaaaacctgccaggctagttgctgtgtacgggatatactcagcgttttcatgacaaacatcttcaattgcatgatataaatcagcgtcacaattggaacctgggaaaactaatacggcaaatttcattgattcgtcgccaccttttgtatgtcgtagtggtattgttccatattaggattggctaagagttgatcacagatttgtgcgacctttttttcaactgcggcttggtcatcgccagccacttgcatttcaaaggacttgccaatgcgcatgccgctcacaccatcaaagccaagtcgttcgatagctttttggacagcctggccttgtggatctagcaccgaatctttataagtcacttgcacacgcacattaaacatctgtagaaccccctaaaattttttctaatcgtcgtaatacgacatcgtacaccgatactaaatcccctttgttcaagcggaaaacatccttatctaacgattcatgcgtcgtttgatcccacagacggcagttatctggggaaaattcatccgccaaaatcaagcgaccgtcataccggccaaattccaacttaaagtcgattaaatcgatatccgcacggtcgaataaatcgattagcagctggttgatctgcttagtttgtttttcaatcacttcaatttccgccggtgtcacaattccaagcgcggtggcttgcgaaatattgatggctggatcatctagtgcatcatttttgtaatagtattcgataatcggcgtggccaatcgtttgcccggtgcttgaccaaacttgcgggcaaaactccctgccaccacgttgcgcaatactacttctaggggcacaatcgtcactttcttgacgagctgttcagttgctgaaatattctcgattaaatgcgtttcaataccatttgccatcaagtatttgaaaattaatttcgaaatctgataattcaataatccttttcccgtaatctgttccttgcgtttgccatttaacgccgttgcttggtccttatagaccattctcaacacattttgatcgtcagttgtaaaaacatctttcgcttttccagaataaaacaacgtctcactcatgcttgaatacctccaaataacatacattttatttaaaattaaaataatcgttcgtgttacattagggtgtaaaaaaactttgaaataacctcatttcaaagttttcatcattattcgcccaaaccaacgcggtcaaagatttctgcgacgcggcgaatatggtaatggtaatcaaacgcgtcgtctaaatcagcgggcgtcaacacattcataatccggtcatccgcttctaacaacggtctgaaatcagtttgttgatcccaagcttgggccgttttaggttgaatcaagtcataagccgcttctctcgaaagcccatgatcgattaacttcaaaagaacccgttggctgtaaatcaacccgaaagtccgccccatattacgcttcatattttctgggaagactgtcaagtccgtcataattttggtgaaccgtcgaagcatataatccaacaaaatcgtagtatccggtaagatgatgcgttcggcagaactatgcgaaatatcacgttcatgccagagtgcaacgtcttcatacgccgttaccatgtgtccgcgaatcacgcgtgccaagcccgtaatattttcagaaccaatcggattccgtttatggggcattgctgatgagcctttttggcctttcgcgaaaaattcttcgacctcgcgggtttcagatttttggagaccccgaatttcagtcgcaaacttctcgattgaagttgctagtaacgccatttcagccacgtaggcagcatgcaagtcccgtggtaagacttgtgttgagatttcttgggcgcgaattcctaaatgttcgcacacataggcttcgacaaacggtggaatattggcaaacgtgcccaccgccccactaattttaccggcttcaacgccttttgcagcttcttcaaaatgtgccttatgtcgttttaattccgaataccatagtgctagcttcaacccaaacgtcgttggttcagcgtgaacaccatgcgtccggcccatcatgaccgtatcttggtaacgtttggcttgtttggcaatcaccgccaatagcgcatcgatatcggcccgcaaaatggtgttggcttgtttcaacaaataaccatacgccgtatccaccacatcggtcgatgttaaaccatagtggatccacttgcgttcatctccaagtgattcagaaactgctctggtgaaggcgacaacatcgtgccgcgtttcctgttcgatttctaagatccgtggaattgagaacatcgcattggcacgaattttcgcaacatcttcagccggaatgtgtccgagttctgaccaagcctcatccgctaaaatttcaactgccagccatgcctcatatttattctggtccgtccaaatcgcacccatttcaggatttgtataccgttcaatcatttattagcgtcccctctagtcccaaattttagtctttttaattgccgttaacgtttcatcaacagccggcgttaataacgtgacgtggcccatcttgcggttgaccttttgaaccactttgccatagtcgtgataatgccaatctgctgactgccgactggctgttagcgctgcttgccagtgctgcccaagaatattgaccattaccgctgattgccacaattgtggtatttggagtggccagttgcagacgccccgaatgtgggttgcaaattgagaaaagtcacacgcttcaatcgttagatgacctgaattatgcggccgcggtgcaatctcattaacgtagagttgcccgtcatggccgacaaaaaactcgacacctaacgtgccgactaattcaatctgcgtggcaatttttgccgcaaccgattccgcttgtgccgctaacgccgctgaaatgcgcgccgggcagatgctgatatgtaaaatgttatctcggtgttgattctcgattgcgggaaaaacggcttgttgcccggctgaattctgactaattatgaccgaaatttcttgatcaaaatggaccatcgcttctaatacacaaacactagcggttaacaactgttgagccacctccatatccattgcggaccgtagaatgacttgtcctttaccatcatatccaccgcgcgtggtcttcaagatacaaggaaaaccaacttttttaacagctggtattaattctgcaggggtcgttacaatctcaaaggtggcatgtggtagctgttggtcaacaagaaattgtttctccaacaatcggtcttgagcaatccgtagcgccttcgtcccttgaggaatccatgtatattctcgggcagcttcaatcgtcttagcatcgacgttttcaaattcatatgtcaacacatcgacacgttgcgctaacatcataatttgtgcctgatcatcataagctgccacaatttgatcatccgcgacttgtccggctggacagtctgcctgcggatctaagataatcactgcaaaccccatctctttagccgctaatgtcatcatctgacctaactgaccgcccccaacaatcccaatcgtttgccctggtaaaatttggttagtcaaagtctgcattacttgccaccgcctttgcatgcatccgtgcttgatactgttgcagtgccacttgataagctgggacctgcaagccacaaatctgtgtcgctaaaataccagcgttaacggcccccgctttaccaatcgcaaccgtcgccactggtacgccacctggcatttgcacaattgataataaagaatccagcccactaagtgccttactttgaattggcacgccaatgactggtaagactgtattggcagcaatcatccccggcaaatgtgcggcaccacccgcaccagcaataatcgcacgatacccgttcgcctgtgcttcttttgaaaaggcgaacatttcatccggcatccgatgagcagaaataatctgtttcgtataactcacgcccaactccgataatacagaagcggtctgttccattgttccccaatctgatatagagcccataacaagtgccacatcactcatattctttgcccactttctcgttgttgattatgctttgattctaacaatcttcatccgatatgtcaaaatattttacgaactattttacataaatacatttaataattcgtatttaaatcataaatacacaaaaaaaaacgattaacctgttggttaatcgtttttttatcgttatggcaatacaacgaagagtaatgcacctaaaatcccaccgatgattggaccgacaactgggatccagctgtatgaccagtctgaatcacccttgttggcaatcggcaagactgcatgggcaatccgtgggcctaaatctcgagccgggttaatcgcgtaaccagtcgtcccaccaagtgatagaccgattgctgtgataaccaccccaaccactaatgggttcaaaccggctgttaattcaccacgtgttaatgctagtaaagcgaagattaagacgaatgtcccaatcaattcactcattaaattggcaaatgggctgcgaatcgcagggccagttgcaaaagtgcctaagattgctgcttgatctttagtagcttgccaatgtggatagtattgaatccaaacgacaactgcgcctaagaacgccccaatcatttgggcgataatgaatggtaccaccgctgcccaaggggtcttgccaatcattgcaaaagcaatcgtcaccgctgggttcaagtgtgcaggtcccataaatgcagaggtatatacccctaaagtaaccgcaaagccccaaccaagcgtgatagcaacccagccagcaccgttggcttttgtttttgctaagctaacgcccgctacaacgccatcccctaaaagaacaaggataaacgtcccaacaagttcaccaagcgcctgaaccattattgaatgttccatgagatttcctccaagttaagtcctattttaaatagtctaattgtgcttcagcaattgctgaatccaataattctgtttgacgtgctttttcagcgtcatcccagttcaataaacgcgccatttcatcaacaactggttgtttgatggctgctaattgatcattgtggaataagatgaagtttgtccgtcttaaaagataatcaactggtgttaatgtcatttcttcgttaactgagtatcttaagctgattgtttctttcaagttcaagccttcagcagcaccttggtccgcgtatgaaacaacccggctgacgtttgaaccgaagcggtttgctaaatcaatcgcatcttcttcatcaatccctttgttcatcgcaacttttgcatagaatttaagggtatcatccacgttatttggatcgaagtgcccacctgaaacttgtaatttcttagaatcgatttcacgaactgtttcattgaaatctttcttcaagatatcccggattaattcaagcgcaccggctgccatcttacgataatcagtaatcttaccacctgataaagtgattaagccgttttcagccactttcaaatcactaccacgagaaacttgtgatgggttgactgattcttcagcatgcgccgttcttaattgactgattgctttttcaacatctgcacgagcagctgttttgttttcgtaatcatcaactgtcttgattaagttgttgaatgattcttctgaaaccttaccgctattagcgccaccaccgttataatcggagctaccgttattagaaattaatggtcgtaaacctgcccagctagcttcaatatcgtttaaagcgatattaacgctaggatagcgattgttgattgcttttaagaggtaatcaacgtctgcttgttcaacacgtgggtgtttgaaatcgcctgtgtaatcagtatcagttgtcccgaagtacgtcttaccttcgcgtggcacaacgaaaatcatccgaccatcatgtaagcctgaatcgaagtaagttggttgtggcactgataaacgactactatcaacaactaaatgaatccctttagtaggacgaagtgtttcttgtgctttgacttccgtgtttaaagcatttactttatccacccaagggccagcagtattaatgactaatttggcatgaatatcgaatgtttcatccgttaattcatcgtgtgctttcaaaccgtttacgcgaccgtttgcatcataagtcattccgactgctttaacgtgacttgcgattgatgcacctaattcgtcagcttctttaatattttcgatgactaagcgcgcatcattattgacgaaatctaaataaacaccagcacccatcaaacggtctgacttcaagccaggttcgcgttggagtacttctttacgatcaattgtatagttggcatattgtgtaccagttacccctgccaatttatcgtataaatccatggcaatcttgacactgaacatgtcgtaagttgcttcaggttcatcatagattggtaaaagcattggtgtaggccgtgggatgtgaggtgcaatcccttgaacaacggcccgttcactaacagtatctgcaacaaccccaacgtcgaaagtctttaaataacggataccaccgtgaactaacttcgttgaacgtgatgaagtcccctcagcaaaatcttgcatttcaatcaaaccggttttgatgcctgatgcagccgcttgaatagcaaccccagcaccagtgatcccgccaccgattactaataaatcaagttgttcgttctttaagttattaattacttgttgacgtccttctaatgaaaatgtcattataatcctcctcattcacgcattttatatggtcgatgtttgaaaacctttgttgcttcaactgcttgttgccaaccagcatagagatcttcccgttcttcttcaggcatttctggttcgaaacgttgcccaactgagaaaatatgcgccaattcgtctgtatcttgccagaaaccaactgctaaaccagccaaaaatgcagcccccattgcagttgtttctaaattagctgccttttcaatcgagctattcaaaatatctgcttggaattgcattaaatagttgttgtttgcagcaccaccatcaacgcggagcactttgatatcaatgccagtatctttttgcatggtttgaacgacatcccgagtttgataagctaatgattgcagtgttgccttaataacgtcttgtcggttcgtcccacgcgtaatccctagaattgaaccacgtgcttctgagtcccagtatggtgcacccaaacctgtaaaggcaggcacaacataaacttcatttaaactggttgaagccttagcggctgcttctgaatctgatgatttttcaaccagttgcatactatcacgcaaccattgaatggctgaaccagcaacgaagactgagccttcaagtgcatagttgactttaccattgattgaataaccaattgtcgttagcaagttgttttctgacattgttggtttttcgccagtattcatcacaataaatgaacctgtcccataggtgttcttaaccatccctggttggagagctaattgaccaaataatgcggcttgttgatcccctgccatccctgaaattggtaccgtgctaccatagaaatgataaggtgctgtttcaccataaatttcagagtttgaccgaacatcaggtaacatggcccgtggaatgtttaaaatcttgaggatttcgtcgtcccaatccaaatcgtgaatgttaaacaacattgtccgacttgcatttgtatagtcggtaacgtgtgaagcgccacctgttaacttccatgtaatccaagtatcgatggttccaaagaggagttcgcccttttcggctcgttcttgtgcacctggcacttgatccaaaatccaacgaatcttagtcgctgagaagtaagcatcaattaatagccccgtcttttgatggaataattcttcatgcccatctttcttcaattgttcggcaatgtcatttgtttgtcttgattgccaaacaaccgcattataaattggtaaaccagtttccttatcccaaataatagttgtttcacgttgattagtaatcccaatccccgcgatttgatggggttgaatccccgatgatataaaagcgtttgcaatcgtcgataaaacagcgttccaaatttcgtttgcattatgttctacccagcccggttcggggaagtactgggggaattcacgctgtgcatcggcgactttttgaccattgtgatcaaaaatgattgaacgagtactggttgttccctcatcaatcgccaaaatgtatttttcagtcatcttaatcctcctttaacaacaatgttaggaaaacgtttcctcgaaaactattatagattaccgatgtccaaaaagaaagcgttttacccaaattaaattttacacaatttaacatccttaccaattcggcatttgtagcacatccaaaattaaaaaacgggtcaataatctcagatcaacactaattaaagtccttcatctgaatcattaaacccgtttttttacttaaatcgttgcagttattttagtatataattcaccgttcatcttgctgagcgaaaccttttcgttcttttcgtttgaaaataacacgatatagattcggccaccgtggctaaatccgttcgacacattccagcctgacaaataaccacggttaataatgagtgctggatcattgtaaaagcccattccatagtgggacgtactccctggttggaacatttgagccttactctgttcattaattaattttccagtccacaacgcgcggtcaaaacggtacatatcagtcgccgtcatatacatatctccgacccctggtagttgcgtgaaattggggagttgtcccgcagcgccatttgccagatagccaatggaagccgctggtaatcgcgaatattgatccgtcatgaaaccagtgtgcgccattttacttggttttagaattttttcttttagatacgttttgtaatcttgatgactcactttttccaaaaccttcgtcagcacaatatagttcgcatccatatagtgccacttgcccggttgttccttaatcccatttttaataatttcttcgattaattggtcgagagtcttcgtctgattatcttggtcccgaccgacaatgcctgatgtatgatgtaaaaaatcagtcagtttaatctgctgcccattcggaaagtccgggaggtaccgactgattggatcgttgacgtttagctttccttgttcttgtaactgcaataaactcgttgcaatcaacgctttttcagttgaaccaatcgcatatagcgtatctggcgtattcaccaactgcttggcccgattagcactgccgtaccccttatccaacaaaacttgcttatcgcggacaattaacgcggtacctgaaaagccaatttgctttaagtagtcatctaacgcttgttctgcaacaattgtcggttggctttctgctttaagtcgttcttcctttgctttagcagcagcgactttttgtgattcgcgctgtttctttgcttcttgcgcttgtcgttggcgcttaatcttggcttgttgttgcgcgatttttacttctcgttggtgatgttgtcgctgaaccacaattccgcccgctaccagaccgaatatgaccagaataccaatgacaccaccaatttgacgccctttttttgacatcaactgtccctccgaaatttctaatctatccattaatttattacaatattaatgtacaatacgcttttggatttgaacagtgacattattgtcatctaaccacacgcaaaaaagcggtcgcgacaaaaaatgtcgtgaccgcttttttggaaccagacgttcttatttaactaataaaacattcgttgcagcatgggcactaacatattgggcaaccgatcccatcatcattcgttcaataacccctttccccgtaatccccaacatgattaaatcaatcccatattcttcaggaatgcgaatcgcaatttcttttttcggtgagccgacttccagaatcggggtgaccttcgttagcccatgattattcgcgtaacgaatattagccgctagttgctccttcacacgatctttttccatcgccgtcatcttggcatagacactagcgtccggtgaaacatagactgtacttggaataatgtgagccacataaagctcagcatcatttcttttcgcaacttcaacagcttccataaatgccttgttcgctaagtcagatccatcgaccccgactaaaattttcttatacgttgtaatcatttagcaacaccctcctattaatgaaatgaatgcgaatcctaactatatgttcatcatactgaacccaataggaccttgacaatttaactgcctaaacaaaagacatatcgttaatatctatagtaccgtcgatggtgcacgaattcgagttaaagaattggcatctctaaaaagcctaatatatactgaccctaagttaattaacgaaagcacttactagctatctcatgcactcatttctaaatcaatcaacttaaataataatttgaaaaagaaaggactgtcacatatggatattgtcataaccggtgggacatctgggattggctatcgcattgccaaagatctcattgcagaaggccatcaagtcattatcattggacaggatgcggaaaaaggccgggcttctgtggctcaacttggaaaagcggccttttttatccaagccgatttagcgaccaaatcaggacgcaaccaagcactggcaagcatcaaatataaagtggataaaatacacgttctagtgcacactgccggtgttttccccagctcagcagaagaaaatattaaggctaatttagtcccccattatcagctaacaatgggcttagcagaccgattaactggcggtcgcgtccttatcgtaaccggtgatccgcaaatcattcaacaactcagcatttgcgaagaacaggagaatactttacaacgtgcaaggtcgttattaacccataaagctttattaaccctctttctcagttatcttctggccgaaaaagagattacggtcaattcatttttcccaggaaatgtcacggatgagctaccgcattattctcaaacattgctgcatactgaagtgccagttggaaaatacttagcactccatcccgatctaacgcagagcaccggtaatttttttgataatgatcgcaacttggtgttactcaatgctcggcaatacaactatgataatgccgaaaagcatttgttacagtatttaacagagtaattgagactataaaatcgcttatcattagtggcaacatgagaatattattttccactaaactaaaaaaggacctgagacagtttttgtctcaggtccttgcttatttgattgaattgattgtataaaaaaaccccgcagatgcggggcacaaatattaaagtttaacgatgtttgttgcttgaggaccgcggtcgctgtcttcaacatcaaatgatactgcttggccttcgtctaatgacttgtaaccgtcaccttggatagctgagaagtgagcaaatacgtctttgccgtcttcaccagtgataaaaccaaaacctttgtctgcgttaaaccattttactgtgccgttgttcataataatttcctcctgatacatatcaatgtacgttttttgttgcaataaattattgataggtaaaagaggaaggtattgtgcatccaaaactcaaattacgtttcaaaatttgattacttgaacagtatagcatggcattttctaattagcaacccgcatcccaaaactatcgactaaatcgctcgcaattcattcgcaaaaggctattaaaataggctttaaagcgcataaactttttatttaaatatttaatttctaatcattttcgaaccgttttgtaaactttgcctcgctaagtgccatcaattcctcaggctcaatttcatatttcgaacagataatgagcagttggtcgaagcaatcggctaactcctcttttaagttagcttgcttttcaacgtcgtttttaacttttttccttgggtgatcacgcccaagttcaatcgttctaacggcccgtgacaattccccaagttcttcactcaagaagttcaaccgaattaatggtgaaaatcgataccaattccgttgttgataaaaatcaactaaccatgtttgatgcgcttttaaataatcttgcattttacattcactccatcattaaaaaaacacctaacctcgcaagcaatgtgcgaaattagatgtctccaagaattattgaatgtcacaggcgagattcgaactcgcgacctacggtttagaagaccgttgctctatccagctgagctactatgacctcattgattgacggtttttgctgtcagaataccgcataacatgctatattataagcaattgaagtagtcactgtcaattaaaattcgcagaaatgagggaaaaacatgcaattaaatcagtttgcacgcttaactaaatctcaatctgaacaaatcacggaattacagcgcattcatttactcccaaaggatttcacccagctccccttccaagtccttgcccaagatatttttcaacggctgttcccagaagcacatagtcaatcaacccagagcgggcaacttagtttattacaagccacaaccgaattaaatctaaccgcctaccttgaaaccattgatacttcattcgatcaagttgtcttctataatgtcgccctccaactcttgggttttgaaatgacaaccgattttgaacttgatcaacccactgcttttatgaccgccacaaaactcccatttatcgatcaagcggcatttgatcagaccgctttcatcgaagccctttatctcctattaacgacgcgtagccaaactgggttactttatctggatcaattggctaaccgtggtttttttgcagactggcaaagtgatcagccccaatttctcatcttcaatggtaaggtccaacccgttttcgataccagccatttaattcgagaagtcgtttatgttgaatcgagcctagatactgatcaagacggccaacgcgacttattagaaacgactatcttcagaccacgcgaaactgaagcgggcttaaaaattccggcactctacactgccagtccttactataaggggattaacgacgtcgatgctgatttgcacaatgttgatactacaattgcgactaaacccgttcaacaaccaaacttagctgatttaacccaaacgccaaccactgcaccgcttcctcaacctcgcgccgttaatggcacaagtatgacaactgaattaaacgcaacagatgacagcaattacagtttaaatgattactttctggcgcgcggatttgcgaacgtttacgctggcggcattggcacacgcggttccgacggcgtccggacttgtggctcacctgaagaaacagcttcaaccacggctatcatcgagtggttagccggtaatcgacgagctttcaccaaccgcaccgatggcattgaaattaaagcttggtggtgtaatcaccaagttgcaatgactggtaaatcctaccttggtactttagccactgctgctgcaacaactggcgttgaaggtctgagaaccattgtagctgaagccgccatttccagttggtacgattactaccgcgaaaatggcttagtggtcgccccaattgattgtcagggtgaagatgccgatgtcttagcgaagttgtgccaaacccgccaaaaagatgccgctgatcatgcgctctctggcactttcttcgccgaccaactcaaagccctgcaagaaggtcaagatcgcatcacaggcaattacaacgccttctgggcagcccgtaactatcgtgacaatctcgccaacctgaattgcgatgtcatcttagtccacggattaaatgattggaacgttaaactacaaaatgccggcgccttgtgggatttattgcgcgatcaaccggttaataagaagcttttcttacaccaaggtgaacatatctatatgaataacattcagtcgatcgatttcaccgatatgatgaacttatggttcacgcatcaattactcggcgttgagaatcaggctgtcacaaaattaccggctgttacaattcaagacaacgcacaagaagccacttggacgacccaggcggattggctagccctcgacaatccaactacgactttctggctaaacgaacaaacattaagcactaatgctaccgaaaatgccccactgacgacttttaaagatgacggtgttgcggcctttagagcccaaaaaatcagtacagccgcttggcaagatgccttaatcgcagatcaatcaagtttcactggcaaccggttgcgtttcttaggctccccgcttaccgaaccgctcattattgatggtcgaattcagtttagaacaagggtcgctgtcaatgccgaacgtgggctattgagcgtgctggttattgactatggtcaattcaaccgtttaggcaccacacctgctgtattagctgctaaaggccaacaactcggctatcagtggcgctatgatgatttaaaggaatttaagctcaatcgaccaagcaattatcaagtcatcactaaaggacacatcaatctccaaaatcgccacaatagttatcaaaccgacgccgtcaccccaaacgaattctatgatatcacgctcgacctacaacccacccattatgatttaacagcgggacatcaactcggtctattagtctacgcgactgatatgggaatgacgattcgtgaagagcaagcattcgtttaccaagtcgacttggctgctagccaactgattgtcccccatctaaatgattaataaggagtctttttataatgtcaaatctcatcacctgtcgtcaaaccctctccatcagtaaccatcgcgtcttcgtcaatgatttgaacgaacatgaaacggtctatggcggacgcttgcttgaactcttggatggttcggcgtccatttcagctagccgcttagcgcgcgtcgaaaccgtcaccgccagcatcgaccaactgaacttcattgaaccattcaaaatgcaagattccttgtgcatcgaaagttacgttgccggtgtcggcacccgttccattgaaatctttactaagattatcggtgaacatctcaagaccggcgaacgattcctcgggctaactgccttcttaacctttgtcacaatggaaaaaggtccggcccttcctaacattcaacccgaatcaccggaagaacggttcatctgtgccggttatgaggaacgaaaagcccaccgtctcgcaaattttcaaagtcaaaaacatttcaatcaaaatatcagtaccgattatccatggaacggtcaataacgaacaaaagaggtgtcgattatcatcatcggcacctctttttatttatcttaaaagttaaacgtccggctccattcatgtgtgccacgatattggaatggttggcttttaaaacccgccatcccaaaactaacggtcattaaaataattcccacaagaatcatacataaactaatcttcaaccaatttttcaacatctacgccaccacctttaatcgactacggaacatcccaactagccagcgtgtgattccaaccgagaaacgaattaagtatttcgtcatgtaccaggtcgcccttgcacaaatcagccccacaccaaccatcacaaaactaattccaagctgcatcaccgcaattatccagccttcttgtaagccaacaaagaacgataaaactaagctgacactcccaccaagaatgccggcagcagcaaagattgcccccagaaacgggcctaaccaaatcaagaaataaccaagtgccactaatatgatggcggtcaataacaacgtgccccataacggtgaccctaaaactaacaagatactgattaaaataatcaacatcggtgccatcttcttttggcgaaccggtttatctggtgtagctaattgcgctacaatctgagctggcgttgctaaactcgcgataatctccgcttccgtttcacccgcttccagtcgatcatcgattaattcatcgtaataatcaatcgtgttggctgcatcactaatcccataccgcgttaattctgccgcaagctgtttaataaattgattcttagtcattgttacactcccttatgtaagtataaatgcccatcactgccggccaatcggccaaaaaactatcaatcgatgcttgtcccgccaatgttaaatggaaatatttacgcaagcgtccattatgttcgacccgataactttcaatttcaccctgcgcctcgagccgtttcaagattgggtataatgttgagtccgaaatttcaacgacactcgatgtatctttgataatttggtagccatatgaatcctctttcttaagcgttgctaacacacaaaattccaagaggcctttctttaattgtggattcaaaccgatcaccctttcgaaagttaatactatattatgcatagtattgtgtcaagcataaaaaaagaacgcccatcagttttacctgatgaccgttcttttgaaacgtttgataacagtcatatcccgactgttatcaaacccttaatctctgccgccgccaaaaatttggagcattgtgaggaataagttaacaaagtctaagtacaaggttaatgcgcccataacagctaaaccagaaaccgaaatttcaccagttgcgccgtattgacggtacatcatacttaacttttgattgtcccatgctgttaaaatgataaaaataattaacatagcgtatgacaagaagtagctaattgcagctgatgccatgaagaagttaaccaatgagacaataatcacaccgattaaccccatcattgcaaacttgccaaagccgcttaagttattctttgtcatgcgaccataaatcgacatggcaatgaacactaaagcacttgatgcgaaagctgccccaatttcaccaatgttatacaccagtaaaacggccgtaaacgtcaatccgttcaacgccgcatatgccacaaacatggctaacgaggctgttggattcttcattgaacgccgactaatctgaacgactaaaattaattctgcaatcatcaagccccaaaccatccacgagctaccacttgataggattgtgtaagtttgtgctttaaacacagtcaccattaaaacagcaatcagtgctgaaattccgacaccgacagccatcaaaccatacactttactgaaaaagcgggcttcgctgtcgacattcacaacgcgtctttcttccatgaatattcacctcttatatttctaaacgggcccataatcacccgattaggaatattgtaacaaatccatccagaaagacaatcaaaatgcctaaatcttaattatctttaggacttaaattactcaataattcttcgtaagcatattcgtatttttgcacatcaccagcgcccatgaagacaacgactggttggtcgaagtctaagagcggtgacatgttgtctaatttcaagacgcggccacctttagtgattttcgcacctaagtcagcacttgaaaccttccctgctttttcacgcactgaactaaagatatccgttaagaagacttcatccgcaaggtttaagctagcggcaaaatcatccattaacgcaattgtccgtgtgaacgtatggggttggaaaaccgctacaatttgtttgtctggatatttttgccgtgctgcatccaatgtggctttaatttctgatggatggtgcgcataatcatcaatgattgtcacgtcagcaactttcttttctgtaaagcggcgtttaacacccttgaagtctgccaattcgcgtgccacttctttgccatcaattttttctaaatgactgacagcaattacggctaaactgtttaagacattgtgttcaccgtaaagtgggacgtggtaatggccgatgttttcgccatgatagtaagcatcgaattctgaaccttgcaccgtccgttggatgttgcgggcttggaagtcatcgtcttcgcgtgtcccataataataaacgggcacattagctttgattttccgtaattcaggatcatcaccccaagcaaaaatccctttttgaactttgtaagcttctgattggaacgcgtcaaacacatcatctaagcctgtgtaataatcagggtgatcaaagtcgatattcgtcatgattaaataatctggtgaataagctaggaaatgacggcgatattcatccgcttcaaatgcgaagaattgcgcatctttaatccctttacctgtcccgtcaccgactaagtaactcgtcttagccacaccacttaaaacgtgagctaataagccactcgtacttgttttaccatgcgcaccggccacgccgatacttgtatagcctttcaataattcacctaagaattggtgataacgaacgactggcaagcccatttcaagggccgttttaatttcaatttggtcatcttggaaagcattcccggcaatcaccgttaagccttcgtgtaaattagtttctgagaatggcagaattttgattcctgctcgttctaaatcgcgttgtgtaaacgtatattgatcgatatctgagccttgtacttgatagcctaggtcgtttaaaacaagtgcaagagcactcattcctgaacctttaatcccaacaaaatggtaaactgtgtcatttgttatcatcttttaaacgtcctcttttcaataaatcacaattatctatatgattaaactaatcccttatagtttaccataatgcgggtttgagctaaataatgaatgtttatttttctctgttatcaattgattgatctctaaaacgcaaaaaaagcagccacaaaaattaattttgtggctgcacttaaacggattctataggtcacactctagcctaatgctaaataatcttcgacattttggaagtagactttataccatgttaagaaggtaaagatggtccagatcttccgacggccgttaatgcgttgttctttattggcatctaacaaggccaataacttatcttgatcaaagaattctgcaacgaaatcttcgctaaagagtgctttgactttttcataatacttgtcatcttctaaccattgcttaattggcactgggaaacctaacttaggacggttggcccaagctgttggcaaatgtttagcagaagcttgacgataagcgtattttgtatcatgactattaattaagtatttagttgggacttcaccagcggccttagccaccttaggatccaggaacggcacgcgtaattctaagctgtgcgccattgaaatcttatcagccttttgcaaaatatcgtttaacatgaagtgatgtaagtcgatatattgcatttgtgagactggatcagcatccgcaacgttatcaaaatcagcttgatagtttgcttgaatcgtcccatcattttgataagcaggtttcaagaaagtattggcttcatctgccccaaaaatacttggattttcgatatcaaaaatcacagattgacccgtatagaattcacgcgggttcgccaaattcgtgtataaatggacgcgacctgggaaggctggcatcttcttaacggctttggctaaactggcacgcgcacccttaggtaatttcttcaagccagaagtgaaggccttaattgttgaattgtgggagtgcatgccgtagttgacatagccagcgaataattcgtcggccccttcaccagataaggcaaccgttactttttcacgggcaaagcgtgacaagaaccataatggcacacatgatgggttcccatctggttcgtccaagtaatattggattttgtcaaattcagcaaacgcatcatcggcattcactttggtttcattgaagttcaagcctaattcatcggcaagcgcccgggctgctgtgacttcattataggtttgatcatcaaacccaacactgaagacttcttgcggttgcaaaatacttgtgacataactactgtcgaccccttctgataagaaagccccaactggtacgtcagccacattatgggctttaacggattcttcgactgcagcatcaatcttagccacttcttcttcgaaagataagtttgaaggattaaatgacatatcccaatatttttcgatgtccaattggccatcttgataagtgaaataatggcctgctgggaatctgaaaacacccttgaagaacgtttcttgtaaatcattgtattgattcatcatgaatgattttaaggctgtcttatttagttctggtttaaattctggatggcgcatgaaagttttaatttcactactgaacatgaaagtcccatctgctaaagtcgtgtaataaaggggcttaatgccgaagaaatcacgagcaccaaataattgcttagtttgtaagtcatagatgacaaagacaaacatcccacgcaattttgtaacaacctctttaccccattcttcgtaagcatgcaaaatggtttcagtatctgaatctgttttaaagtcgtgaccaagtgcgatcaattcagtccgcatttcacgataattataaatttcaccattgaaaaagactagcttagtgtggtcttcattataaatgggttgatcaccctttgctaaatcaatgattgataaacgccgaaagcctaatgcgactttatcatcgataaaatcaccatcaccacttggtccacggtgtttaatgacgtccatttgttggttcaatacttcttttttctttggtaaatcaaataatccaccagcaaatccgacaatcccacacatatgtttaacccctcttttgtgttttactgcttaattgactgcaaaacgaaataacaattaaagggtttgtctttaaccaattaattgctatctattatcatactattttaattttaataatcccataacaaaatcgtaagatggattattttagtaaggctgcgactgcatctgctgtcacttcacggccgacttcccaatcatctggtaagaccataatccctttagcaggagcaccagcaacaccgatttcacgggctgcacagatcatgccgtcactttgaacaccgcggagttgaccaggccagataattttaccttctggcatgacagcacccactgttgccacaattactttttgtccttgtgcgatattggcagcaccacaaacgatttgaacggtttgatcaggtgcaatctgtgtttgagtaacgtgcatatggtctgaatcaggatgcacatcacattcttggacataaccaacgacaatgtgtggtgtttcatcagccactaaatcaccggtgaaaccagctgctacaagtgcttcatttaaaacagcaacttgctgttcagttagtgtttgaacaccgttgaattgtaaatcgggcaataactcattcaccgctaagaaattatagccgatggtttgatctgcctgatcactaatccgtacgattgattgtttttcagttgtcacttgcttttcaacatcaggttgggtcattaccactaagatgttgggaaaagccgcttggttcatacttgcaattaacatttaatgactccttcaaggttagttcaatgaatgaataaatccagtaatttcgcgttttgttttccgatctttattgacaaaacggccgatttctttaccgttatcaatcacaacaaagctaggaatcccaaagatttcccattcttcacaaatatcgataaattggtcccgatcgatttcaataaagtcgtattccgggaattcagcttcaatttctggcatggctggtttaataaaccgacaatcactacaccaagttgctgtaaaaaataaaacatgtttcccttcagtaatcagatgagtcagattcgtatctgtcatcgctgctaattctttcattatgcaccccttcaattttactactcgttttaatataagcggtttgtccgtaaatgtccactccttaggaccaaaaattatgctatactatttaaagacaaaaacgactgaggagtttttctttgaaaaaaaatgggcaaacgtttaaatatttattaaccggcatcggttttgcgctggcggcggctgccagtgcgaagcaatatcgggcgcaacaaagaatgatcaaattaaaccaaattttagaagatgttaaagccggcttaaaacatgaaggccagattgtgggttcttggattgaagaaagtccccacttattctcacaaaacaaacggacctttccagtctatcaaggtggcatcatctgcgagcgtgaagatggtacaaaccaatttcgattcaaggtagacgcaagaaccggcgtcgtgattgaattctcacaaatttagagtgcgcagcgcggtgggcacgttctgaggattagcttagtcagacgagtgaccaatttattggtcgcttgactgacgttgctaaccgcaggaacataccgcgcggagcacgtttcaaccaatattataattaaaaaggtacgctatcctagataaaatctggataacgtacctttttgagttgaaacgtgctttatcacactgtcttttccggttagctacagaaaggaatcgatggtaaagaacccccatcaatccctttcttaggctaatcctcaaaggcaacccgtgtgataaaaacactcttgctgaaacgtgctattgacgctagatttctgcgcctaactacacctgtcaaattagcgattatatcactcattcgccagcctatgttaatgctcaaaatctgaccgagcgtcaagtgcactcttatctaaaacgtgctttcaaagctagcaccctgtgcatagctacgtccggcaaacaaccaattgcattggttattcaccagactaggctattgctcgggtgctgaccagctttgaaagcactctacttgtagtgtgcctctaatctgtaaatcacttggccgcgcttgctgaatttttcttcgtattccgtttggatgttgtcttctgcaagttcactattgtgtaaatcgagtgagatgtcgtcaaaaaccatcccataatcattcaggctcatcaatgagtattcgaatagaccttggttatcagtcttgaaacgtaagtagcccgttggttgcataatttgttggtattccgctaagaatgacttatatgtcaatcggcgcttttcatggcgcgtcttaggccatggatcagagaagtttaagtacacccctgccacttcgttttcagcaaagaaagttgttaaggctgcgccgttacccaataataattggagatttggcaatttcaattcaacttgtttttgtaaaatgacggcaatcgctgattcttggatttcaactgcgataaagttccggtctggatatttttgtgccatctgagtgataaattggcccttacctgaacccacttcgatgtaaatgggttgttctttggcaaaacgtgtttgccacttgccggcgatatcttccggactcactaaaatcatgctggggttggccgcaattaagtccgccgcccaaggtttatttcttaaacgcattatgttctccttgttgatgccaatcaaaaaggttggacacttgcccaacctttggcatttaatttttattaattatttcagaagtcactgcttctaagcgcaatatgtcacggttcatttcagtaaaacgaccacgttgataatggtgcttaatgctttggagtaggttcaaactgccgtaccagttgacgcgcatcattaattcaggcgtcacctctaggccgtagttctcaagccactcgtgccattcttgacgtggaacatattgaaataaaatcattccgaaatcgactgcagggtcggctaacattgccgagtcccaatccactaagtagagtcgattaatatccgataacaaccaattcttatggcttaaatcgccatggcacacctctgcagaaggtgcttgtaattgacgtaacgtttgcttcaaataatcagctgtttgttctaaaaatgggtgttgccgtaaatcttgcggtaagtcgtaaaaataggcttgcaacatttcgtttgctgaccagacacgaccgccaactttttgtaacattcgtttcaatagttgggattgatgcacccgtgctaataacttagcgacttgtgggctattcatctcatcacgtttcaaggttcggccgttgagccactcttgtgcggttaagacatccccactcgaaatccgcttcgtccagattaagcgtggtgttatgccttctgccgagagcgccgctaaaaatggtgatgtgttgcgctttaggaaaatcttttctgacgcgcgaacgcctaaaaatgcagcgcccgtatcaccaccggccggacgaacttgccagccagtatccaggtcaaaattcatcagcctcgactcctcttcaataaaataaagcgccaaaatacagcgctcacgttgcttcaactgtctaataactaagggtatcatataataattagccagtagtcgtcaagtaggaaagcatgcgtgtcacagggactatgcccccaaccgtttaggcaaatagaactgaacaaagccaatcacgagcacgaacaatgctaaaacacttaaaccaacttgaatcgtcatccctagtgtcactaataaaatgacactaaagagtaacgcctgaagcaataataaagtccgcattaattggctgaatgcttgaatccgtttggtcgttgatactgggtatagatgagtgaaaataatttgatcatactgattgtaaaacggtaataattgaaaaccaactagataaatcaatagaagtccgagtgccaaactcaaccaccatatgtgactgaagcacagaatgatgccccctaaaacaactaaccggatatataacccgctgaattctgtgccccgcaaaaagccacgcgcatataaatagaggtaagtattggctggtttagccgtaattagctttaataagccatctaaatagcgacgacgcttaacctgactactgagccctggcacatccgtgaagaggttatagaggcgataaattcgtcccattcgagaatcttctgcaccaactgccgctaaccaatcgaataactgtgtcttttgaacacgcaccaattgttgtcgctgataataggctagtccaagcgctacaagcactccgactaaatttagccactgatataattgactggcaattattgccaaatcaaggattagcgaaagccctttcgttgcctgggtttcatccgcttggtaccactgacgcaactggattgaaaagcggcggtctttgatgattaccaatgtaatcaagacaacggctatgtgccatgccgggaccgtcttagtaattaacaagagtggcgccactagaagcgtcacaaaagccattgcaattaatggtaaccagctactatataaacgtgctgatttcaaatacgtcacaaggccactttcttttggcaataagaagacactatccgcttcttttaataatgttgctaagcggccaaaactaactgccgcaagtaatactaaactcaatacaggttttagccaccaagctcgtggatccagtcctttgacggcgttagcatatgtgtagcccaacgctcctaataaaaagataatcgcaatcacgaaatgatcattgaaaacgaggcgcaaatacttcacttgttcttgaatatgtttttgcacgcgtttttgccataatgcttgcatggttaaccttctttcgtcatctgcagataaatatcgtcgagatcggcgtcagccatgttaaattcaacctttaattcttcaagcgtgccagtcgttcgtacgcgaccctgatttaaaagcacaaatgaatcagcatattgttgcgccgttgcgagaatatgggtcgacattagaattgcagctccttgtgcttttttttcagcaatgatttctaataaatcatgaattgccaatggatccagtccagtaaaaggttcatcgatgataaacaagtcagcattcgtcataaatgcattgacgatcatcactttttgccgcatcccttttgaaaagtgaaccggaaaccagtctaacttattgtctaatcggaatcgttttaacaatgcattggctttaacccacgtctcttcaacgtttaaatcataagccatcattgttaattctaaatgctcctttaaagtcaattcagggtataagacaggcgtttctggcacataggctactttttggcggtattggtcgggattcgactgtaacgtcacaccgtctaaagtaattgtgcctttttgtggtgtcaataatccaatgatgtgtttaatagttgttgatttgccggccccatttaaaccgattaaaccaaccacttgattgtttggcacagtaaagctgacctcttttaaaacggggacgtgcgcgtagccccccgttaattggttaatctctaaactcataatcaatagcctcgttttttggtttttaaaactacttttttagtgaatcctttttcatatcatatcttaacacgaagtaaactgcgagtgtatgcccccactcaatatttttccatccgcttacaaagctgatggcagtagcgaaaagcccttgtttatgatagcattaagctgtattgagacttcaaataagagaaagtaggcataattaatggatgattgtatcttttgcaaaatcgttcgaaatgaaattccgaacacagtggtctatgaagacgacgatgtcaaagccttcttggacatcacacaagtgacacccggccataccttgttggtacccaaaaaacacgtggcggacatctttgaatacgatgctgatttagctgcggccgttttcagtcgcattccaaagattgctaaggctattaaagctagcaatccagccatccaaggaatgaacatctgcaataataacggtgcggtggcttatcaatccgtttttcattctcatattcatcttattccacgttacacagcggatgattcatttgcaatgcaattcggtgataatagcgctgattacactgctgaccaactacaagcgatcgcagatggtattcacgcacaattggaggactaatcatgtcattttcagaaggattactagttggtggcttattagggacggcttatgcccttctcaccgcttctacaaccggccccaaacgacaacaagcgattgcccgctatttaaacgagctctcagaaagttcaactgatgttcaacaaagtgctgttcaattgcaaacagcttcgcaaaatttatcaaacgaactcaaaacaactgcagttacatcacttggtggtatcagtgatgcattgcaaacattttcatttgaagcagcaccacgaattgctcaaatcgaagaatcagttgatcgtttgacacaaaacttaaaaaaataaattcaccaaaaattagattgtatgcaagcgataaggttaagcatatcaacgattcccgcgtttttagcgtaaaacctaaatttgaaagttctgtgaagttttagacgcttcgttcaatttagttagtttatgtgttatattaattggtgaattcactacgaatttattcataaatattttgataaggatgtgtcatacaatgaagaaatggctattagccgctgctagtttattaatggtagtttcactagcaggttgtggtagcaagactatcgcaagcctaaagggtggtaaaatcactcaagacgaatactataaagaaatcaaggaaacatctgccggcaagcaacaattgcaacaaatgatcttgcaaaaagcgcttgaaaaccaatacggctcaaaagccatcgataaaaaagttaagaaaacttatgatggttacaaaaaacaatacggttcatcattcaactctgtgcttgcacaaagcagtatgacacctacatcatttaagaacagcatcaaaacacaatacttaacacaagcagcactaaaagataacaaaaaagtaaccaatgctgacttgaagaaacaatggaaatcatacgaaccaaaagtccaagttcaacatatcttagttgaaaagaaagaaacagctcaagaagtcattgatgcacttgcaaaagacaactcaacaaagaacttcaacgaattagctaagaaatattcaactgatactggtacgaagaaagatggcggtaaattacctgtcttcgatagtactgatacatcacttgactcaacattcaagactgctgctttcaaattaaagacaaacgaatatacaacaacccctgttaagacaacttatggttaccacgttatccggatgatcaagaaccctggtaaaggtaagatggctgatcacaaaaaagaattaacagacatcgtttacgcttcatggcttaaagaccaaacagtgatgaacaaagtcatcactaaggtacttaagaacgctaacgtatctatcaaggacaaagatttatcagacatcctttcaagctacggcgttaacagcaaagcttcaaaatcatcatctaaataagcattaacaaaaagacccccgctgctggcgcagcggggttctttttgtacatttattctgttggttgatctaaattaggatcttcgactgggcgatagaaacgccgcccatccattgcgaagagccgttcagtaaactgacctgcttccgcatgttgtaatgactgggtcatcatcgtgatacttgcatctaattcatcaatttgatgcagaacttctgcttcaagaacttgtggccggacaggtgaaccatattccattaaaccatgatgggccaagataacatgccgcaatagcaacatatcctcagcattcacgtcgatctttaatgtatcacaagcccgcactatctcttcatcaaccagtacaatatgaccgatcaaattgccacgaaccgtgtattccgttgaaataggaccggacaattctagcgtcttacctaaatcatgcaagataacaccagcatatagcaatgcctcatcaatttgtggatattgggcagcaatcgtcttagctaagcgcaacattgaaagtgtatgataggccaagccgccactaaacgcgtggtggttggtcttagccgctggaaaactgaagaattccgcttgatgtttttgcattaaatgtcgaaccaaacgttgccaatttgggtttgtaatttcgaataacatcgcgccaaattcgtcttgcatctcggttacttgcaccggtgctttaggaataaactggtcaactgtttgcggttcgtcccccgtcgttaagcgcagtttataaatcttaacttgcggattattttggtataattcccgcttaccttgtaaatggatcacctgacccgccgtaaatttagcaacgtcttcatcagaagcatcccagtatttaccgccgatttgtcccgattgatcttggaacgtaaacgcgatgaattgcttgccgtttttagcaatccgcacgtccgccgttttaattagtacaaataaatccagattctcgtcgttttggtaatcaaataatttctttgctgtcatgtgtcagccccacttcctctagatttaaccaatgatccgcttcaaagtgtgcttgcgtccgcggattggccgttaaataaatcacttggttggccgcactgagtcgttggagtaatgtccaaacggcgatttggcgttgatcatcaaagttgacaaagccatcatccaccaataaaggtaatgagactacgtcagctacctcttctgcaaacgcaaagcgtagcgcaatgtataactgctctgcagtcccctgtgataattcaccgacttcaaaaagcacttgatccgcccgtaaaaccgtcatcagtgtgtcatcgaagttaatcttaatataccgattctgggttagaattgcaaaatactgcgttgccttttccaataaacgggggaaccgttcttgtgaagcggccttcagcgtcgcttgaatccaatcaattgctaactgcttagcgagccactcttgggctaaatcagtaatcttagcctgttcttgtaattgtcgctgtcgctgttgttgataactgtcattatcgacaagttgcgcttgcgtcacgcgtagttgcgcaacagcttgttgctgttcttgtaactgacttgtcaaacttgccacttgttctgtaatttgagcggcttgttgcttaagctgttcttgactagcgattgcttgtaaagccggcaagtccgttgccaattcgcgttttaaatcagcttgacgttgttcattagcacggcgctgttgctcattagcaacacaactggctaattctgcggcggttgttaagttagcctttgctagtaatgctgtttgtgcagcgtcttgttctttaatcgtgtctgttaagcgtgtcacttgttgttgataataccggtaactctcgttgctttgtgcaaggtcttgtgtgagttgggtaatccgggctttgaattggctcacctgggacaagttctcttcatgactgccctgtaacgcccccacccaatcacgggcaaaagcaaacgcatcccaatacatatttagtgccacttcgattgcttgattttcggcttgttgttgtttgagcgccatggtcaattgagtcatccggcttaaagcatgctgcatcgctaaaacttgactgattggcatcgccgtttcgtagccagtttgcgccaataataccgcgctttgttcgtgcatcgtctgcaatattgcttgttgtgcttgtaaggcagctgtcttggtttgcttttcagcctgcaacacatccaacttagcgagcgcttgttgccaagcttgtttttgcactggttggtcatggtcagattgtttattttgccacatcatgtaaccaccatagccaagtgcggctagtccaacgaccgcaatgactttcagagcgcccggcaagaaaagaccaatcatgaatatgactacgccaatcagcatactcaattgactggcacgtccatcagtcgttggcgtttcttgtggttcaacctgactaactgccgcgttttgcgtggctaattgcgcctctaaatcagccagttgcttggtcagcacttgactggtcgtggttgccccattcatttcagcttcggcttgttctagttgtgcgcgttgctcatctgtcaacggatttggtagttgatccgtttgccattgatactgcgctgctaattgggctttttcgctagcgagttgtgcgctttggttttgccgtaatccaagtaattgaatttgtttttgctgttcatttaattgttcaaacaatggcaccaacgtctcttgattagcttgataaaatcgaaattcacctgtttgatccaatgtttcttgaacagttgctacctcggattttgcttctgctaacgcctttgcattgcgttctcgttcgaccactaatgcttggtattgttcgtcaatcgttaagtcaaacggcgttgccttttcaagtttagtttgaagtgcttgccattccgcataacttggccaacgatcaagcaaatgttgcaactgcgcttggcgttgttttaattcagccacttgcttttggtgttccgtcatcgtcgcaacggtactctgcaatagacgtgcgttcgtttcatattcttgataaccacgactagcttcgttaacggattgcactaactctggataattcttcaaagcaacattcaatggccacttacgcccagagggtttgaaaattttctgactgtccttatccagttccttggcaaagtcgagccactcatgactccccaccgcaccaatcgtcaataaatgctgcaaaaaatcagcctgttttagattaaatatctgatttaaatcctgttggttcgtttcaaaaatctgcgtaaacaaagcttcatccgctggtgccaagaggtcagctaagtaatcagcgccaaattcttggccttgatcgatgaccgttacgtcgcccccaaacttaccggaaagccgccgaatcacaatatcgcgatcatgatagctaaccagtaattcaccaccgtattgcgcgccgtttttgggcacatattgttcataccgttgtttagcggtcgcaaagccgaataacacgcctttaataaaggctgtaagggttgtcttccccgcctcgttttgaccataaaggacttgatagtcggtattcaaatcaatcgtctgatcatgccacttaccgaagcccaaaatggtgactgtcttaattcgcatggctaatcccccatcttcttctcttgtagaattgtcgtgactaagtccttgagatccgcttgaaattctggtgtttcaattgcttcccggataaagttttccttcattaacggctttgctttttccagaatattgtccggtgtcaagatagctgcagccgcttggtcccagtaggcttggtcaatctgactaaattgctgttgtgctgcaaaccgcaacttcaacgcgtatggccaatgcagtggttcactattttccaattggtcttgtaagactgccaataattcaccattattaatccgttgcaataaatcactcgataatcgctccgcgtgtgttagctctagcgccactaaactagcatgatcactttgcatcaattgggcactcaaagccgtttgcaattgcgttaagctcatgtcaggtgtcacctcaaactgttgacgttgccactcaatgaccgtcgttggtttgaacgttaaatcgaactgaccatctttggtgtccactaaataaaagcctttttcaccaggttcattcttatgccgcccttgtaagttccccgggtaaacaatcgctggtcgttcttggagaatctggcgcttatgaatgtgacctaatgcccaataatcgtaatggcaagcgttcaattcactaatcgtaaatggtgcgtagtgatctgtatcggccgttgctttttgactaccgtgcaacgtcccaatcgtgtaagttgtgctggcacgttgtggaaaatcaaccactcgatcagctgacaaccactgttgatcataactgaaccctacaatggtcacactctcatgtcctttggtagtcagttcaaacgactctacttgtgctccaaaaacatggacattggcgggcaattcaaaatgcacttgattggcatcccagtaatcatgattcccgtaactcagatagaccggaatgtcgacatctgccaaacgttcaaactgttgttttaaaaatttctgaactggcaaactctgcgcttcttgatcaaatgaatcaccaactaataatacaaaatcgacggcttcatcgatggctgtctgaattaattttttaaacgccgtgaaagttgacgcatggattgtttcccacaatgctgtcggtgcttgttttaatccgacaaacggactgtcgatatgggcgtcagctgcatggataaatttcatcttgaaaaaccccattcttttggccggtcgtaaccagcttagataagcttcattataccattgccacgcggtgtgataaaggcgattagaacaaacgttctgtttttaggcaataaaaaagcggtgaatcgaaatcaatcgattcaccgtttgaaacgtgcttctggttgcaacaacttccgcttaatttaaaaatcgcgttaatcctagaacctggattaacgcgatttttgtattaatgctcagttgctgaccgcaatcagtcacactcttatttgaaacgtgctttttgaaactgacttttccagttaactacaaaataagactgatgacaaaatacgccatcagtctcatttttaggttaatcctcaaagccaaacccgtttcaaacgcattctatgcttggtagatatctgcgattggttttgagatgatttggtttaattcatccattgtttggcttaattgacgttcttgttccatcaagttcttgattgcgtcgatgtccccaattttttgagcaagttcttggatttctttaatttcgtcgtccgttaattcttgaccttgcatttgtttttgttgaagtgtcatttgttgcgtttggaatttcttaaacattgtgaaggcaatatcgtcttttttcaatgctgcaaaggcattttgtaagcctaaaaattgtggtaattcttgcaggtgcgttgccatttggttggcatcatcataaatattaactgtcattgtactgactcctttttccatgtatttaattgaaaaaacctttcaaattattataccattgattggctgtatctttcgctttatttatcccatctttaaaacccgattcaattgaatcgactaattcgttcgatgtcccactctgttcttttttcgccaacgattgagcatcttcagtatcaaagtccgtctgtgctgtggttggtaagagttgttgcatctcatatttaaagattggtgctaaaccgtcaatgctagtgttcttcataaagtgatcttgatccgtcttgtcataccccatccaagtcgcaacaacaatatccggcgtataaccgactaaccattgatctttggtcccaaagccataactatcaggcacttcagtactaccagacttccctgcgacttgatagccattgggtttcgcataacgcccagtcccattattataaacgcccaacatcatgctagtcatttctttggctgttttttggctcataatccgtgtcttggatggttcggtattatcaacaatcacggcgccactcgcatcaacaatcttccgaataaaatgtgtttcagacaattcaccgttattcgcaaaagccgtataagcactggccatttggtaaggtgaaaccccaccttgccaaccacctagagccatcgccaagttttggtcactcttgggtactgaaatgccgaatttttcgaccgacttaatgccgcgtttgaggccgatttgatttaataaccaaaccgccggcgcatttgtactgttggctagcgcctgatacattggcatcgatccggtataaacgttatccgggttcgttggtatatagtggttagtcccatagctttgcttcttatcttcaagtgatgaatcatagtggtagccatcttctaaggctggcgtataaaccgccaatggcttgatggttgatcccggttgacgcttcatctgtgtaatgcggctataaccacggattgtatactcaccacgaccaccaacgacggctgataccccgccggttttcggatcaattgcaactgaactaccttgaactaaggtgtcatccgcagcgttatcagggaacaaccaattttgtttaaaggtggtttccatcttactttgttgggattggtcgagggcagtatagatcttgtatccgttcttaacgaggtcttcttctttcaacccaaagcggttaatggcttcattcacaacctcatcaaagtaatacggataacgatacccatccgactgctcgtaggtattcgtcacgacaagttgctctttcttagcagcgtcggcttgtgcttgcatcaacttgttattatcgaccatcaagccgagaattaagttccgccgcgcagtcgcattatctaaatggtcagccggattatagaaactagggctccgcaacatcgctgcaatcacggcgccttcactagcatctaattcactcgcattcttaccaaaataccgttttgacgcatcctgaacgccccacaccccgttaccgaagtaggcattattcaaatacatcgctaagatatcctgtttggaatagaccttggtaatctgaacagctaagaataattcctcaaacttccgcgagaacgtctgcttctgactcaacttggcattcttggcgagttgttgggtaatcgtactcccaccaccggtaatctgcccatgatgaatcactaacccaactgctgctcgtgctagccctttaatactgaatccatgattggtataaaaggtccgatcttcagtcgacaaaacagcattttgaatctgcggcgatatcttatcaagatcgacataagtccctttttgcgaatataacgtccccgcgcgttcatccttaatgtcataaagcgccgttggggtttgtaagttggccttaatctcaccgacgttagccgtcttcgctttaaacgtgagccagctgctcatcgcgaaaatgagaattaaaacagcgagaatcagccatctcgtcaattgtagtcgataccagacataacgaatcacgcgccagacgcgtttcataaattgtttaatcgccaaccaaaacggcgaagcttgcttgttcatgcgatccctcttcttacggtcaaaattaatcttgtttaattgtagcatattcgtcaattgacactgatgccaatcgaagacattaacaatcttttaaaatttacttttacaccaattttcgctaaactaatagcttaaaggtggttgaactctaatgataatttaccaaaaaaaagtgactttagcgcccgactttagtccgatgtctgtccgcggcctgctgaatcactggttagtgccgcaaaaaatgcaacatttcttgcggattaatcaagatattttggtcaacggacattatctcgccttcaaccgacacgttgaagctggcgatcaaattacgatgaacttctcagaagtttccgttaaggtccaagactacgaacttgatgaacggcaatctttttccgttttatacgaagatgatgatttactggtcgtcaataaaccggcggggattaaaacccatccgaacggtcctggtgaaaacttcaccctaatgaaccaagtggcggcctatcttgctaaacaagataaaaaggcctacatggtccaccgcatcgatcaagcaaccagtggcgtgctcttgattggtaaaaccccaatcgtcatcggcattttaaaccgacagcttagtcaaaaaacaatgtcgcgccaatacatcgctattgctaacgatccggaacaaacactcttggaacatgcaacgattaacctcccaattggtgtcgatccatacaataagcgcaaacgcacgattgattacatcacaggtttatccgcagtgacccattaccaattactgcatcgaaaaggacctgcagcaaccttggcagtcaacctcgaaacagggcgaacacatcaaattcgcttgcacctggcggctgatggtcatcccattttgggtgatccgttgtactttccaaccgattcaacacagcgcctactactccacgggcaaacgttgcgctacacagagcccttcacggatgaacaaagaacagtaacagcccccatcccagacatttttaaccagtatgtagattaaagagtgagttatcagccggatatctcctgaggattaacacagaacatgtttagctcaacaaaataaggcgttgcgacaaaaaattacttttgtcgcaacgccttatttgtttgcttatctcgctgttgctagatgttgtgcgaaacgttcgtttaattcggctgctagttcctcactagggctaatgataacaatcgtatcgtgacccgccagcgtcccgacaacttctgggtaccccaaatcatcgattaaggctgctaataaattcccgttacttgggagcgtcttaattacgtttaacatttgcacttgtgtaatggacaaggccacttcacgcagtttatcttttaatttctgagtttgggtgcgttcgtcatcgtgaaaaatcgtatagcggagctcaccgttcacatcccgtgccttaacgatttgcatctcccgaatatcacgggaaatggtcgcttgcgttgcatcaatcccatcttgtttcaacgttgctaataaatcctcttgcgtcgaaataacttgctgattaatgatttgttcgattcgtgcttggcgatctccttttttcacgactgccacccctttttaccttaattggctctattataccagtttttatcaaaattcgatagacagcgctttatataattcaaaaaagcgcatgttcataacttttttacccacaaaaaaagagcgccgattactcgtgcgcccttttaagattaagctttccgtgcttttcgtactttaaatgtggttaaaattgcgaccgcaacagcaacccctgccaaaattgagaggaagaacaaaccaatattattggttgcacctaacaccccaacgattgggccaccatgtggcactgcatcggtgattttgaagaccatcccgactgcactagcaactgctgaaccagcaatgatacttggaaaaacttgttttgggttagctgttgcaaatggaatggcgccttcagtaatcccaatcaagcccattaagatagctggaatcccagctgatttttcttcttctgtataaagatcgcgacgaacaaatgttgcaatccccaatgccaatgatggaacagcaacggcacaagcaacagcacccatgatttgtggatgtccagccgtaatcgatgccaccccgaataagaaggccactttattaactgggccacccatatcaatcgcgaccatcgcaccaatcacaacgccaagaatcacactcgtttctggattttgtgaaagggccattaacatatcttgtagtgccgtcatcaaccatgaaataggtgcgcctaaaacgagaattaaaacggctgagataatcccaacccctaataacggaatgacaaaaattggcatgactggccgtaaatcttttggtacgggccatgaattaaaccatttaaccaagtaaccagccgcaaaaccaacgataatcgcaccaataaatccagtcccggcttttgtaccaaggatgtctgtattgttggcgaccattgcaccgatcattgcgggtgctaaagctgcatgccccgaaatagcataagcgatataaccagcgagaattggaatcatcaaggtaaaaccaatcgtcccaatctgattcatactactccaaatggtatgtggtggaatcaccattcctgctttagtcggatgcccaccaatcgcgattgacaaggcaataaacaacccaccgacaacgacaaacggaatcatatgggaaaccccatttaataattgcttaataattggactttgttcatgactgtcctcttgtttagcttctgttttcggctgattcttgccataaatacctgccgttagtgctttttcaatcagtgtatcagaatctttaatagcttcagcggtcttcgcatatagtactggcttgccattaaaccgttcttccccatcaacggcaacgtcagcggcaataatcacgaaatcggcatcagccacatctgcggcgcttaattcatcctctacccctgaagcgccttgtgtttcaatcttaacttcatatccgcgagcttgcccggctttttgcagtttttcagctgccatataagtatgggcaatcccaactggacattttgtaatcccaacaaactttttcatcttctaaatcctcctagttaaattcgatctcatcgttaactaacgtgtagagtgccattgcatcatgccgattttgcttcaaattatgaataaaagcgtcatccatcaacttgcgcgcaaacttcgacaacacttttaaatgcgtcttattagggtcatcgagcggcataattagggcaatcgcgatttcaactggtgcgtcatctaatgcttcccaatcaacaccagtttcaaacgtgacaattccgacaactggttgagttaatcccgccactttcgcgtgtggaatcgccaccccattcccaaaaccagttgtgctctcagcttcacgcgcattgaatcccgcggttaatgcaacccgatctaacccattcttatcagcaaataattgtgctagtgttgctaatgccgtcggtttatcatccccaacaacgatatctgtaaaaatattctcaacatcaaattctttcatctggtaacactccattctaatttttctgattcaattgtgccaagatggcgagggcagccgtcccatcagatgcttgtgcgacttgctttaaaagacggggggtttcaatcaattggtctaaatcatgataaatcgcccgcatttggccatgaacagtttcgttcaaggccataaagaagacgagctgcactttgtcgttgtgttgccaattaatactttggggtgcaatcagcaacccaatggctggcttggtaattaattgtgaatccgcatgcggcaaagctactcgaccaagtgccgtacttgctaaagcttctcgggccagcgctgcctggacaaccgttggctttgcatacccttgatcaatgagccgctgaccaattaattcaattgcgccttgatccgttaactgctcttgcgtgacaattgtcagttcgggttgcaataaagctactaagtgattggtaggcgtcggttgttcagtaatcatctggcgaatgattccaatatcatgccgatttaacaaaggactgacttcaatcaccggcactgacaaacctttaatcgcaatcgtactgatgactagcgattccttaatcggggttgcaagtagttctcccaaggcaataatacgagtaatccgtaattcttgagcaaacgttttggccaaccgttgccctaataattgcgatgtcccaatgccaccactacaaaccaccacaacactcaagcgtgcatcttctgaatgtcgttcaaaaaaagcttcaaagtgtaaactaataaaggctaattcgtcctcattcatttgaatctgatactgattttcaagcaccggctttagtaatactgcttgatcaaaggcttgcggaaaattctggcgaatttcatcagtatatgggttattaatactcaatcccattgcaagccggcgaagtgccgaacttaaatgaaccgccaacccctgaattaattcctcatcaactgctaattgagcaagctgttgccgtaatagttgtggcagcccgactgattgccgcaactcggtctggatagcttgaacagatgtatccttcgattggatcgttactaaatgacggttgagatattcctgttcaaaatccggaattgtcaattcaaatcgccgttctaaaatctgtactaacagctgtgtttcggcaatgaacggtgtcaccactggttgggctccattgcttccaccagttggtgctggcatcatcagatgaatcgctaacgactgaaactcgtaatcagtaaatgatagcgtacttttttcaattaattccgttaaagctgtgagtatgtttttaatcaaggctggttcaaacagttgattcagattatccggtaattgaacatggcgcactaactgtccatttaactctttagcctcagtccgttttccccaatactgactgattaactccaccgttgcttgccgcttttgatgctcagaaccgattaaggataaaccggtatgcgtgattgccaattgaagaccgaattgcgcgagtttttgctttacctttttcaaatcattctcaactgtactccgactcacgtatagggtattagaaagttgttgaatcgtaatcgatgctaaacctaataataatttagccagaatgcaatgacagcgttcttccttggattggggacgatcattggcctttttttcaagatgattggctaatgtcgcgacatccccggtaaaataaataccgtcattcggttttcgaacgagtttcacattaaagggctctttcgatatcattcaaggtggttgcaatggtgcgctctgaaagctgtaactgtgcggcaatgtcgacatagtacgttttatgctgggccaaaatatattgaataatagcgtgttctcgtttgttcatgcttatcgcaactcctcgtttcaatccctctacgctatctatagtctaatgtttatgtatccgcttacaaatgtaattatttgcaagattattctggtaattattgcgcaatgctccataagcttttcttaatcaaccggttatgctggggattgtttatttagttgctagcctaatccaatccattaccttatccggtcaatttatcgcacaaaaaaagagcatcttaattaaaagatgctcttactagatatgttttgctcgccatattcaatggtaaccctctaagtcaaaagactacaaacataatcctttaacgcgggctgttaaacctcaaaatgtgccgacacgaacatattcaattattttttgatattgtagaatgagttgatacctttgtatgaagctgtatcgcctaattgttcttcaatacgcattaattggttgtacttagctaaacgatcagtacggctcattgaacctgtcttgatttggccagcgtttgtagcaacaactaagtcagcgattgttgtatcttcagtttcacctgaacgatgtgaaacaacagctgtgtagccagcttctttagccatttcgattgcttctaatgattctgttaatgtaccgatttggttaactttaacaagaattgagttagcagcgcccatcttgatacccttacgtaggtaatcagtgtttgttacgaagaagtcatcaccaacaagttgaactttttcgccaagttctttagtgattgatgcccagtcttcccagttgttttcatcgataggatcttcgattgaaatgattgggtatttagcaactaagccttcaaggtatttaacgaattcaggtgttgtgaattcttccccagttgaccaacgtaatttgtatgtcttgtcttcgttgttccataattctgatgaagcaacgtcgatagcgattgaaatatcttcgcctggtttgtaaccagctttttcaatagctttgatcaagtattgtaaaggttcttcgttgtttgcgaagtcaggtgcgaaaccaccttcatcaccaacagaagtaactttaccgtcagctgataaaagactcttcaatgcttggaaagtttctgaacccatacggatagcttcgcgtacagatttagcaccaacaggcataatcatgaattcttggaaatcaactttgttatctgagtgagcaccaccgttgataacgttcatcattggtgttggtaatacgtgagcgttagggccgccaagatattcgtacaatggtaagcctaattcgtcagcagcagcacgtgcagcagctaatgaaatacctaagattgcgttagcgcctaatttacctttgttttctgtaccatctaattgaatcatagcagcatcgataccgcgttgatctgtagcgtcgaaaccaatgatttcttttgcaagaggaccattaacgttttcaacagcttttaaaacacctttgccaccaaaacgtgatttgtcgccgtcacgtaattcaacagcttcatgttcaccagttgaagcacctgaaggaacgattgcgcgaccaaagccgccatcttctgtgtaaacttcaacttcgacagtaggattgccacgtgagtctaaaacttcgcgacctaaaatatcagtaataattgacatgtaattttctccttttttggctaatgctaagcattagcgcttttttggatgtcaggcaaagcctacatctattttagctaattttacgccattcgtaaacaggaatgcgttaaaaattagtcgttaaagtgaactaagtctaagaatgaagcaggttccatacttgcgccaccaactaaaccaccgtcgatgtcttctttgcccatgatttctttaacatttgcaggtttaactgaaccaccgtattggatacgaactttgtcagcaactgtttggtcgtataacttagcaactgtttgacgaacaacagcacagatttcttgtgcttggtcagcagaagcagttttaccagtaccgattgcccagattggttcgtaagcaatgaccattgagctaacttggtcagctgaaaggcctttaagaccttctgttacttggtttgaaacccattcttcagctttgccagcttcacgtgtttcaagtgattcgccacaacagaagataggtgtcatgttgtttttgaagattgcgtgtgcttttttattgatatcttcatcagtttcgtggaagtaatcacgacgttctgaatgaccgatgatgacataatcaacacccatttcattcaatgtttttggtgaagtttcgccagtgaatgcaccagcatcttcgaagtaacagttttcagcagcaacttttaagtctgtgcctttagctgcttctaataaagcaggtaagtcaacagcaggtgcaccgataactgattctgtttgatcaaacttaggtaagttggctttgatagcattcacgaactcagttgtttgagttgggttcatgttcattttccagttaccagcaatgattggtttacgcatgagaaaatctcctcttaattttaaattatttgtctgaaatagcagcgataccaggtaatgtcttaccttctaggtattcaagtgatgcgccaccaccagtagaaatatgggttaacttgtcgccaacgcctaatttcttaactgcggctgttgaatcgccaccaccgacgattgttgtagcgcctgataagttacctaagaattcgccgattgccaatgtccctttagcaaagttgtccatttcaaacacacccatagggccgttccaaacaacagtcttagcatctttaaggacgttttcgaagtcagcaattgctttaggtccgatatctaatgccatgtagccatcaggaatgttaccttcaacaatttctgtcttagcatcgtttgagaatgcgtctgcaacaacgttatctacaggcaatactaatttgtcgccagctttttcgattaattctttagccaattcgatcttatcttcttcaactaatgagttaccaattgataaacctttagcagcgtagaaagtataagtcataccaccaccgacaatgactttgtcagctttagctaataaatgttcgataacaccgattttgtcagaaacctttgcgccacctaagatagcaacaaatggacgttctggagcgtcaactgcttcgcccaagaatttgatttctttttctaataagtaaccagcaactgcaggtttgttattagctttcatagctgttgcaatcccaacgtttgatgcgtgagcacggtgagctgtaccgaaagcgtcgtttacgaacatgtcgcctaatgatgcccaatattcgcccaacttaggatcgtttttactttcgcgtttgccaaagtcgttgtcgatgtcttggaaacgagtgttttccataaccaatacttgaccatcagtcatcgcattgattgcatcttctaatgctttgccttcgtttgaagcaacgaaagcaacgtctttgtttaataattcgccaagacgtgcagcaactggtttcaatgtcaattctttcttatcttcgtcactcttgatacggcccaagtgagaaagtaagattgccttgccaccattgtcgatgatgtattggattgttggtaaagcagctacgatccggttatcgtcaccgataacgccgcctttgattggtacattaaagtcaacacgtactaagacttttttgcctttaatatcttttaaatctgcaactgtttgttttgccatgtggacaaacctcctagattttcataaaaaaaggcggaaggagtttacctcctcccgccttataaaatgctatcgcattcctaagttcacaaaagtgaaattagattaagctagcaaatttttctaatgtacggatcatttgagcagtaaagcctgattcgttgtcataccaagcaacaactttgacaacttggcctgcgccaccgccaacgatttgtgtttgagtaggatcgaatactgaaccgaattctgtaccaatgatatctgatgaaacgatttgatcatcgttgtaaccaaatgattggttgccttctgtaactttcttaacagcagcgttgatttcgtcagctgtaacttctttgtcaagagttgcaactaattctgtcaatgaaccagtgataactgggacacgttgtgcgtggccgtcaagtttacccttcaagtcaggaacaactaagccaagagctttagcagcaccagttgaatgagggatgatgttagcagcagcagcacgtgcagcacgtacgttaccaccacgatcaggaccatcttgtaatttttgtgtagctgtgtaagcatggattgttgtcattgtaccagctttgataccgaaagcatcgttaactgctttagctaaaggtgctaaacagtttgtagtacatgaagctgctgagatgatgttatcgtcagctgtgattgtgtcatcattaacaccgtaaacgactgtcttaacagcaccagcaggagctgagataagaacttttttagcaccagcatcgatatgagcttgtgatttttcttctgatgtgtagaaaccagtactttcaagaactaagtcaacaccatcattcttaacccaaggaatattacgtgcatctgattcagcataaactggaatgttcttgccatcgataacgatgctgttttctgtagctgatacttcgtggttgaattgaccatgagctgtatcatactttaataagtgtgctaacatgtctggtgatgttaaatcattgatagcaacaacttccaatacatcactgtttgttgcgtaaatacgacgtaaagctaaacgaccaatacgtccgaaaccattaatccctacttttgtagtcataatagaatttcctcctttaggaaatgaaaaattttttattttaaagggttgccccttgtaaaatcgagtttgcggcaccttcatccgtgattaaccacgtctgtttaggtgcaaggtgcatgtacgcttggattgcttgggctttagaagcaccacttgcaaccgccagtacacacggaatattcaataagtcacgaatctgtaatccgattcgcggaatcttgtacacgacttcgccttgtgcattgaagaagtaaccaaaggcttcacccaccgcatgcttttctttaagcatcttgatggtttcaatcggcatctcacgacgttcagccatcgcaatggcttcaccaatactgtgtaaaacaccccggcttcgttcaatcagttttaacacttcttgaacacttggttcttctaacaaaggcgcgtacgtcttctcactcacctgttcaggcacatacaatgcccgatgcttaccacctgtctgcttagccatttcggcacagactgcattggcctgaatatcaacactttcaccaattccccctcgagctggcacaaagattagattgcgctgtttcgatagatcagttgaaagttcatgagctgcttcagccatcgtcgttccgcccatcactgccacaatactttgcccttgtggtaataataattgtaacgtactattgactaatttgcccatttcggtgaggacttttggttgttcatcactattgccagaaacaatcaagcaatgttcaatgcctaagacttgactcaactgacgttcagtctgatgtaaccctaagaattgatccattacttgttttaactgatcgagggtttcattccccttcacggttaaaaccatacctgatttagacgaattaagcaaaccttgtgctttcagaaaatccgtctcagttctaattactcgctcgctcatcttcagttgttccgcaagcgttcgtcggccaactggcgcgagccaatcgatatgttgtaacacctggtaacgtttcttaatgataccgacgaaatctggcgcaaccgcttctattgcagataattcatcgcgcaattgctatcgcctactttccgtgggacataaaatgtccatctgtgtcattagtcgacccatggttggcaaaaaataaaaggcaacttactaaaactagtaacttatccttttgaacaagaccattataacaagtgcagaaaacagatgcaatgctttggggttgataaatacgttttctttccgaatattttttaaacgttgatttatcgcgatttatcaaaatttacacttgaaatttccgcttaactccgctaatataatatattgtactattgagtacgcggaatgcgtcgctagtgtaatggatagcacccaagattccggttcttgagatccgggttcgactcccgggtgacgcataatcattaaaagataggttggtatagacgtgcttaggcattgatatatcagcctttttcttttctctaaatagattgttattcacagtgaatacgtcaaaccgtattcaaaaccgtattcacgtattcagcaaaaatcacgtacggggcatatacatagcttacagcaggcggtcatattaatggccgttttttaatttgagctaacttcattaaacaacggcctatattaaacatagaccgtcaaggatcatactagcaactactagcattagtttctgtcgtaaatcgcgactgtattcattagataagggggtgtccccagttttggggatatgtttcaaacgagcccaattttggcttggttgtattttttaatctagattatatttaggggtaacgtttcgttacgccattatgtttctatccaaaaacacttgctcaaacttgagccaatctatattctaagttaataccgaacggacttttccgctaagttgatccatgaggaggctaagcgcatcccactggaaacatatgtccaaaattggccagatctaaaattaattagggcttaattttcagccatactaccccaccctcacacgtatataacgcatctctgcggagtcttgaccccttcccgttgtttgtttccccaagggattagcaaatcattttaaaggggggcagatatgcttatcttactcacggaaaaggtctgtccaattttggaccgaccttttttagcccatcaggacgatacggtatagtagcttgtttcatgtccgccaagttgtcggatatataaaatccatcacatacaccaccactctaattcaggagagtggttctaaactaccgtttcggtacctcagattgcttccatgcaattagccgaaaccaaaaatggattgggcaacatctcgttaaaatcaacggtatctaaagttaattagcatgggatttttccgttgtactgtttctataattggctaagtatctgacgcaccatatcagtgcattagatgctgttgtaatatactaactcatctttaaggagtcatcaattcggtaactccttcttttcgtgcttgcgacaagagaaatgctgaagtggttcctagatattcggccacttcctgaagcgcgtcagcgcctggcgttgactcgtcccacttactaatcttgcctggaacaaaattcagatcgcgttcgattcgataatatgttcacacgcgtctaccagctgattgcctagattatctaccacaataacgtcacgatggtaggcttatttgttataccttcaagtacgatattcagacaacacaccagattaaacgccgcaactaataaaacaacaaaaaagatctcccacacgaggagatctccaaaggatagaaactatccttcaacaccatttgacaaacttccgttttatttcaaatatagattacccacgaatctccgcttcatcagaaacccgcttaaatttaatatctgtatcaactgctttaaagtgtttctcaccagccagaatcttagcccgttcatgaggacgtaactgttcaaaacttgtatcacctttcgtttcaacgatgaagtataggtgttgctcatcatcttcttcatatagcaatgcccagtctggattgtaaggcccaagcggtgtgcgaatcttgaaccaatctggcagcttaatgtagaacttaacattgtcatccatttcagccttacgagcaaaatccttttcaatgcttgaatcagttacaacatagtcataaacagtcttttgtttactttcatcaactttaaccgaatttcctttttcaccgaggtaagcattcaaggtttcagtgctaaacagcgtctgttcgtattcatcatttgtacgagtatattcaataccatccacaatcaattgattcttgattgcgttgataatcttcgcagcctgattcatatatgacaatggattgttcttaaaactatccagattgttgactgactgcaaaattgcgacgattgtcttgcgagtcaaacttgtttcattttgcaagaaagtaatgatatctggcaatttgtacgcaccactcgttgttgcacgaacactgctttcgctagattcatcagccttcacaccggcttgactcatctcaaccatccccttcttgtaaaggtaggtccccttgcgagtctggatggaatcaactccgtcaaatgattcatttccttttgcagcaaattcgattaatttgtttgaatcaaaatgaatcttataagtcgtcttgtatttgattttgttccaaagttctaaaaagtcatctgctaaggcttcttttacaaccttgacttcgactttatccttggcatctttgatatcaagactcttaactttagatttagcagcaaccaaaatctgtggcacaacatcaataaattcttccggtacttcaatttcctgatcagtaatcgcttgtttcaacttatcggttgctcgcccggatgaattaataaattcttcctgtttgaggtagttgaacaattgctcagatttttctttgccaagaatttccatttcttccgtaacttcatcgtaatgcgtaataatcgtcgcaaagctatctttattaaatacaccaaagataacaccatcttcttcgtattctttttgaagaccttcagcaaaatccttatagctttcatttgccataacagtcagcgtgttaacagcaaatccagggacacgttcaccatcttcgttaaccgcaatacgcaggccacgaccaattttctgacgtttgttaattgtatcctttgtttcaatcaaagtggcaatctggaatacattcgggttgtcccaaccttccttcaaagctgaatgagagaaaatgaagcgaattttattagccttcgctgtatgatgcttctcttcatcatagaaagtcagtaagccttccttgttcttcataatcatctcgtaggtagattcatcggcctgagtatcacccttggtattttttaacttacctttattatctgctgagaaataaccatcatggacttcggatactggcacattcacatcgttcaattctttgtacttggacaaatgaatcaagcgttcatattcttcttcaaaaatacgggcataacggccaagactaggattgccttcttcgtcataaacacgataattctcaactttgtccaagaagaataagctcaacaccttgattcgttgccccgattgtttgaacttcaactccttgttcaagtgttcttcaatcgtcttagaaatctgagcacgttttattgcttcatcttctaatgtagctgactcaaacgtgattttttcaggattacccgagaaagtaactgattcaaatccaggtgtagcatcaatgtattgaatgaacccaacttcatcatacgcctgaagcttggttttactaaacatatcgttaccggctttaaagttcatagttattttatcagcgtcattacgtgtctttttataaacttcaatcttggcactgataccgttcttaccagtttttacgtcaatcaatttcaaatgagcacggttaccatcttcgtccatctcgatgccggctacctcaatctgcttaacgagttgattgtcgtaagcatcaaccgcaccaagttgataaatcttcggataagtattatctcggtgagtggctgaataacggaagcccgctgacggatctaaactctttaaagcatctttagccaagtcagtattatcaacagactgtggttcatcaataataactatcggccgtgtttcagcaatcaggtcaattggtcgtgcaccagaaagttggtcattttcacggttcatgacgtttgtatctttgttgaaagattgaatggtcgtaaccatgatatcaatcgtatttgccgatgaaaatgaacgaacacggtcaagtttgctgctatcaaacatgaataaatcataaaccacaccgttgtattgatttttgaaatagtcttttgtaatctcgaaggatttaagtaccccttccttaatcgcaatacttggcactacaatcacgaatttcaaaaatccgtattgtttgtttaattcaagaatcgttttcaagtaaacaaaagtcttaccagtccctgtttccatctcaatattgaactgcgggaaagctttgttatttccaaacagattgtcacttggcacgattccattcagaatttgagttttgttgacgttcttcaacatctgttcttcattaagaatcacacggttaccaacaccgattccatcctcagtgaacatcgaaccttgtgaataatcatctgtaatcgtaaaatttgattctttaattgtctgaccttcaaacacgcgcaccgcactgttaacggcatctgtttgatagtcgagtgtatcaaattgtattttcaagagcctttacctcctttgctttaaatacttaaaatgtcattgtactggatgccacttgcattgagctgctcaatcgtatttaacttctcactatcattgatgaatttttcatcctgtaaaacaactactgagttttcagcttcttcatcagcaatttgcttaataatatgacttgccacttcgctcgtaatcttgtcaccaagtactacaaatattgcaccaaaggcaatatcataaacaaccgcatccccaacttttgtttcactaattggataagtcaaatcaagaccttgcttcaacatgatttcataaacaacatcgattggttttgaaccttcttcaaagttgttagccagtaattcaaactgctcattcaagtcttttggttctgcgttccatttcttgatatttgatttagagagttcaaaaactttgaagccgacatttgaatctaactctaagtctttgatggctaaacgaatacgttcttcaccaacttcagttaggaaatgcggacgatttattttatcaagatacttaattgctgttttcagtactggttttgcatcgttatctgatgttttcaaagaatcatccaagttctctggtaattgaacaagaataaatttacggtttccgccatcttctttatttttctttaatactgcttctgctgtggttgctgaacccgagaaaaaatcaagtacgattccatccctgctacctccaagttcaattattctttccagtaattgaaccggtttaggattagaaaatacagtatctccaaataatcttttaattcgagcagtaccgtttgtcgtagttcccacatcgtcccacaatgtttttgatacttttccccgctctaaagcttcaaataagaatctctttctttgcggaccactctcaccagtggtaccgaaaacaattctattatcattcatcagttcaacaaatcgtgaatattcatttttccagctggaaccttcattaggataataacttacgccggtatttggattaacaatctcataaagttgatttggtcgaactcctccaacctggaatggatcagctttccaaggtccacgcgggtcgttatcaggatttgagaatccttcaccatcatcaggaattctaaactcatttctatttttaacaaagtaatccatactcttaaagtaaaccaacgtatgagtcactgacccagaaataatagctttattagtgacggacttagtagaattccaagcaatatccgcaagaaaattcttttcaccaaaaatttcatctgcgatttttttcatgttaaaggcttcagcatcacttaggtttacaaagaatacaccgtcttctgttaaaaggttataagccagtttcaatctagggtacatcatatttaaccaatctgtatgatagcgtccacttgtttcagaattgacattcagtttgttaccgtcgttgtctacttgaccagtttgttgaaggtaattttcaattgagtctttaaaattgtccttataatgttttagaatatttggtcaatataaaaacccccgatattggattttggtccaatatcgggggttcacttcattaggactttttgtcttaacgctgttttttttgtgactttaaggggcctttttgaattcgcattttaagcaagtttcgcgaccacttgtccactcactaatctgaaacgtccttaaaatgcgcctctggtgattgatcgtttataaacgtgattagaccgtgatttagccatcaatagcttttaatgtgtttgagcgcattcttttggtagaaagaatgcgctcggaatccctttaaatcaacgataatcaaaggtgcaaaataccaccgcatggtttataatgatatagagaaaaagaatgcggtcaaaaaggcggaaaaaacatgcggaaatcgcgcactaaaaaaggcaaaaaattaaatgttcaacctttacggacaaaagatgagattgaagacatgaaagtcatcttgcgccattcacaaatgggtagtcgcaattatttattatttttactcggcattaatactggcttacgctgttctgatattgtgcagttaaaagtcaaagatgtgatcgaagacaatcccgtgattgttgaacaaaaaacgggtaagtggcgccaaattagtttggcgagtttacgcccatacatcagtccctatattcaaaataatgaattgctaggcaatgattggttgtttcctagccgcgtcggcgataaccacatcaccgtcaacggtgtttaccgcatgttgactgaagcaggtaagaaacttgggcgtaatgatattggcacccatacgatgcgcaaaacttacggctactggttctacaaacaattcggggacgtgcggtcattgatgattgattttggtcattcaacgcaagaaacgacgctccattatattgggattacccaagacgaagtgttaagcaagaaacaacaactggcgattggactttaaaaaaagcttgcattaaagtgaggtctaaggtgtatagtaaagacaatataataggaagagataggagattatagttatgaaaacagctacttttatgggtcctggtcaaatgaccattaccgaagcaccaaaaccaacgattgaaaaaccaaccgatgcggtcgtgcgcattatccgcgcgtgcgtctgtggttctgatttatggtggtatcgtgggatttcaaaacgagaagtaggcggtttcaccggtcacgaagcaattggcatcattgatgctgttgggactgacgtacaaaatgttagtgtcggtgattttgtgatcgtgccatttacccatggttgtggccactgtgccgcttgtttaaacggttttgatggcgattgtaccaaccgcgagaataatcctggtggctaccaagccgaatatctccgttatcacaatgcaaactggggcctcgttaaagttcctggccaaccaagcgattactctgatgaaatgctgaataatctattgacgctttcagacgtcatggcaaccggctatcacgctgccgtgtccgctgaagtgaaacccggtgacacagtcgttgtcatgggtgatggcgccgttggtttatgtggtgtgattggcgccaaattactcggtgcgaaacggattatcgcgatgagtcgtcatgcggaccggcaaaaattagcccttgaattcggcgcaacagacattgttgctgaacgcggtgacgaaggggtcgcaaaagtgatggcgttaaccgacaacgctggggccaacgccgtcttagaatgtgtcgggaccgaacaatccgtcgccactgccgtcgccgttgctggcgcaggggctgtcattggtcgtgtcggcattccccaaaaagcagagatgaacaccaatgccttattccggaagaacatcggtttgcgtgggggaattgctgccgtaacgactcatgatcgcgctcgtttattggatgctgttttaaagggtgccattaatcctggtaaagtctttacacaacgctttaccttagatgatattcaagccgcttatgaagcaatggatcaacgcaaagcgattaaatcattattaatcatcgctgaataatataaaaagtgccgcagaacaggaaaaatcctgattctgtggcacttttttaatgcgcaataagacttaatagataaccgccaagacagccgaagatcagactgagcaaactcccaatgaggtaatattcggcgaagtggtgttcgttggattcaatggctttaaagcgggtcagcgccttaatcgccacaatcacagcaatactcgcaacattgtgcgtgtaaaacaagattaagatggcaaaccgttctaaatgaccaatatgccgacccagttttgcaccatctggcaggcgatccatgtttaaatccagtccttttaaatagaagctaatgaaataatcggcaaataataacgtgctcaaaacaatactggcagccaataacaatcggttcacatggttaaacgcccattgctggccgaggaacatgctcacaagaccgatcactattaaatggagtgcttgatcgatggtataactcatcactggtacgcgattgctggttaaatgtagctgtgcttttaaaagtggctggctattctgtttaaatagatcaatgagccaatgactcatcacaatgatgactaagccgattagtaacggttgccaatgtggccaagtaggtggtgccattaaccaaccgccaccccataaaataagcactaacgggacttgtgtcagtgcgtgcttgcataatggccaccatttcacaccgagtttcgttgatcgtttgcattgagccatctgatcagattgaaagacaaagtcgcagccaatatgactaagcaagaaaagcgcaaagaggttcattcgactgcctccttaaaggtcatcagttgcgcgcgcaacgttgccagggtctgttcaatcaagggatactgaatctgattcagtaagcgactgactttactagaggctaatgcacgccctttttgatcactgtagtctagttcataggaagcaacgccgtatttggtccacaacaattccgctaattcatagcgtttcaatgttggttgaagcacgatttcagcaaaagcgtccttgcgcaactgcgtattcaagagttgctcataaattaaataaaagagggcattaatcccatttgcggctggttgatctgccactaattgaaattgaaaggccgtcgtcataaagggataaccttgtgctaattcagcaccttgacgcaacagtttggcttgatctgctgcggcgagggcgttcacaattgctgtcccgttgacccgattgatatcctgatagtcacttggactcggcgtagtcatcgttcctaagccaaccccaaaataaaaagtgggctccgccagccccgcaaaatgtgtctgccagaaagtttgaaaagcgtcactctttaaataggcattacaaaagggatagacatcaacaatctgtgcctggtcatccgctgaaaaaccgcccaatagaccatcaccatccttaattgcaaatggtgttaataacgctggaaaatggtgattcaacgtgtcggcgaagtgttgcaataactggagtgtctgtgcttgttccgtaaaacgggtgcggctatccgctaaatcaatgaaacaataggctgtctgcatcgttctcatcctctctgaaaacatttgattataagtacataataggtgaatatgaacgaataatcaaatgtttttgaggagcggtttacatttcgcagcctacgtattatagttaactacataagtaactaaccaattaacgaaatggaggtgttccggatgctttttgaatttaataatgatgcaccactctaccggcagattgccgaacaaattgaagagggtatttttactggggtctttccacctggtagtcaagtcccatcgacaactgaaatttccagacaattcaatatcaatccagccactgtactcaaagggatgaatcaactcgttaccagcggcttaatcgaaaagaaaaggggactcggcatgttcgtcacatcaagcgcacccgcacagatcactgaaaaacggcaatctgaattttttgaacactatgttgcccaatttatcactgaagcacaacaattaaacctaaccaaagacgacctaattgcactgattgaaaggggttatgaccatgcctaatttacaaaccacacaactgattaaacaatttgggaaacaggtcgtcctcgacgacatcaacttaacacttaaacccaatacaatttacggcttactcggccgcaatggggtgggtaagagtaccttattaagtattctagccaatcatcaaactgcatccctaggtgagattaaatggggcgatacggtcttaaccggtcgcgatcatccgttacaaacgatttacttgatgtcggaaatcaatctctttaataaagatgacaaattgcggaccattattaaaaataccgccttactgcaaggttcatttgatcatgcactcgccaaagaaatgctgactgcatttgatttgaatccaaaaaagaaactcaatcagctttcaactgggtaccgcacgatttttaaaacaattgttgcgctttgtgtgccggcggaatatgttttcctcgatgaaccagtcttaggcttagatgctaactaccgcagcctcttataccgctacattttacaggcctatgaaagtcggccacggacatttgtcgttgcgacccatatcatcgaagaaatcgcgaccttagtcgaacacgtcttggtcttgaacgacgctcaattaattgtcgatgatgatttggaaaccgtcctcgccaagagttaccgtgtcagtggcccggaagaacttgttcgcgagtactgtaccgacttaaacgtcttagattcccagcaaatggggaccttatacacggtttatctttatgacgtcttaccagaagaacgggttattccagatcgtctaacgattgaccatatcgatctacaagaaactttcattaaattaacgaacaaaggaagtgaagcacatgtttaatgcaatgatgcggtaccgcctagcagcgatttggcgcggcttattaatggcaattgccgtcttcgtcatcatcacaggcggttccattttaatcttctccaatcaaatgacctggaaggccttttggttcacgctcttgagcggttccttagtcgtcagccaactcgttctgattttcctttcgtttgcgacaacccgcaagccgtttaattttgggattctaaatggcattccgcgcagtattagttataccacccaagtgattagcctcttcagcagtcaattgattagtttcctaacactctacggcggcacatacttcattgctgcccaccaaagtgggattaatcgcttctttcttgatagccgtttcgtcctgctggccattgtactcatctggaccatcatggcagaagggattgccattagcagtttcattacgttatttgaacgtaaagcttggcttttcttatttgctgcatggctaattctgtcgacactctatcaacactacattgaaccagcgattgaacgcatgttaccaagctgggtggatacttttgtcctgaacattcctggtgatcaaccaatgaaccaactcgcaaatctattccaccaaccgattttctggattagtggggtaataggcatcctcatcccattagttattgctggtatttgtcaacacttcatgcaaaccagacgcatgacgattcgttttaaacgatttgcacgttaacctaaaagagctactaccaagattattttggtagtagctctttttagctagttactattgtgctaataattcaactaattctgtttttggaatccctgtgaagtaggacgtggtgtcgattggttcgagagtgcttgctaaatgttcacggtcataaaccgtgccgactaactttttagccaattcgttggcatcgccggaaccgaagaagtcgccgtagaacttgacgttggcaatcttcccattttcgattaacaagcgcgcatcaatcgtcccgaaatcgaagtgtttgcgtttttgaatcgttgatttaggtgacttgccatagacccagtcccaattgctatagagatcgttaaaaatcttatcgatggcttgttcgtctgcggccgttaattgatattcgcggtcggcaatatcagctagttgatcggcgtgcatcaagttcagtaataagacgtctctgaactcttctgtcgacatgttttggtattcaggatcaacgtgcccttttaggtttgtgacgcgttgtcgaatcgatttaatgccttttgacgcaatcttatctgcagggacattcaaggcttgggtcaaaacatctaaatcaacatcccatgaaagggtaccgtgggagaaggttttaccattcttggtgtacatcgcgttccctgagaattttttaccgtccactaacatatcattgcgaccagaaacttcagccgttgtggcgcccatttgatggagtgcatcgacgattggttgcgtgaaggatttgaaatcaccgaattgttcagaatctgcgttcaccacgaaactgaaacaaaggttaccgagatcttgataaatcccaccgccaccagacaaccggcgtgtgaccgtaatatcatggtcttccacgtatttttgattgatttcttcatacgtattttggttgcggcccacgataatgcatggtttctcaatgtagaatagtaagagtggttcatcgaaatttttttgattcattaaatattgttcggttgccaagtttcggcgaatatcatttgacttcatcacaacgtaatacatcagcataaaacccctttcataatcactacggatttattatactacatatcgcatcaaccagtgtactgaagcattaaaaaagcggtccccgataaaagggggccgcaggattaatcatcgctatattctaaaatatcaccaggttggcagtctaatacgcgacataacttctcgagcgtcgaaaagcgaattgctttggctttaccggtttttaaattcgaaaggttcgcaatcgtaatatcgacctgttcagcaagcgccgtgacactcattttccgttgagcgagaattacgtctaaattcacacgaatggccattgaattcctccttagaccgttaaatcgacttcagattgaaaggcgattgcacttttaaaaagatcttcaacaatctgcatcaaaatgaggattgcaaacggaatgaagaccaggcctaaccccagcaacatcaagcctggtgcatcttcgagttgcgtaatccggtagaaaaagggtagggcaaaaagggccgtcaaactcgcaaccaaaatcgcttttctaattgctgatacatatcgtagcgtctgagggagaaaaacttgatggtgctcaattaagcggagaatctgcgccaacttgattaatgcaaaccaaatactagccgtcacaccatacgcagcagtcgccaacatccagattgtcgctgggtattctaagtgtttcgtggtcacaatttggatcgtcactaacaaacttaacagaccaaataccgccgcaattccgagtaatgccattctaagtagccatttttttaacattcatctgatacctcgtttttaagaatagttttattataatcgttttttattgaaaaacaattaatttttatcgtttttcgataaaacttaatatttaagactagtcaaagtaggcgtaactgttataattatagggggtaaactaaaccgtgaaggactgatcttatgaaaatcaggcatctctggctaacattgacgctgaccgttgcattattgggactaacagcctgtcagaaccatcctgcaaaaacaacgacgcctcagcatagttcgcagaaaaaaacggtgcgtccacaaaaccaacagacttacgacaaaaaagatgtccaagcctattggctgtcttaccggcataaaacctttttcgtcattgcgcatcaaccgaatgaacaactgaatacgaaaaataagctcaaaacgtttttgagtcaaacaactacgcaaacactagcgcacgattcctatcaaaaactggacgaagacggcttcatttttattgccgataatcagtttaaaccacaccaagactttggctatgggatggtcacagtgggcattccacgagacttcacactacaagccattgttgccacagccaatctaaacgacccgctctacaatcgctatccaatttatcaaattcaatgatcagggagaaaacaatcactatgaaaaaaataatgccagtctttattttattactatctatcacaatgttttttatgactggttgcaatcgttccattgaaacacatacaccatccaaaacacagactaaaaaagggactagtttacctaaacatggaacaatcagattaacaactacgactcattcgaatcaaaagaaagtctctggttatatttatcgcgtcggtaacgattatttagtgctaaactctgtaaaagggttcatcaaggatgccactgctatgaaacactatcttgaaggtggcaaagaacaaactacaaatacgtattttgaccagccaaatgtgtttgcaatcgctaaagatcaagtaggtaagcatgctaagctgtttaaacttgcgtacggcacgatcacttacgaagagcttcctgaaaatgatcgcgcgtatgtctctttcgctatcattacagacaagaatattgatgaattacccaaaatcaagattgatcaaatcgactaccaagtaatttaaactaaaatagcgcgtctcactatcttacaagtgcggcgcgctattttattctagtcacgccgttgatacgccatgactgtcagtggcataaacaccagaataatcacagcgccactgacgaggaccattgttgcggttccgctccaatgaccggtgttcaaaattcctctgattgccgtaatggttgtggtgacaggattaatgcggacaatggtttgtagaaaatgcggtaaggttttaactggaataaaggcgttcgataagaaggtcaataccagaatgatgatcatcgataaactactaatcagttcggcatttttaaccagtaaaccgactaaggcgaaaatccacgacgttgaccagccaataaagacagctaggaataacgccatcatgagtgcgccaaaattagcggtagggcgccagcccattagtgccgcggtgaccattgccatcccaccggaaagcaacaatcgtaagctatcaccaactaattgaccggcaagcggggcgattggcgcaattggtaggtcttaaaacggtcgaagattccctgattgatatcttctcgtaattgttgaccggaacctgaagcggcgtttaagatactctgtactaaaatcccagaaaccaacatcggtaaataggcgtggacgctgccggcaatgacaccaccgaataaatagccaaataacagcgtgaaaataattggctgcaccagcacatcactgacattatcaggattatgcaaggtcttcagtaaattccgatgggttaacgttaagctattgcgcaacacttgcgtatttgttttcatttgtagcatgttattatctccttagtttttaccaacggtcattttcaaaaagacgtcatctaacgatggggctgtcaattgtaaatcgctgatggtgatgcctgccagctgacattgatttaaaatcgcggtgatgacgcccatatcatcgtgcactaacggcccaatgattgtttgatccgtcacacgcacgggctgttgcaaaacggtctcgcaaatcgtctgagcctgggtaacttgttgttgattggcaaccgtcagctgcaactgctgaccaccgacttgcgctttcagctcactaggtgtcccactggcaatcaattggccatgatcaatcaacgcaatccgatccgcatattgatccgcttcctctaagtattgggttgtcaaaaagattgtcgagccatccgcgactaatttttgaatcgcatgccacatttgcgtccgggttcttggatccagtccagtggtgggttcatcgagaaagaggatccttggcttgccaactaagctgaccgctaagtccaaccgtcgccgcatcccacctgaaaaagtcgccaatgtttgatccgctgattggtccaaatcaaagtccgtcagtaactcgttagctcgggttcgactcgctttggcactgagcccatttaaccgcccaaataagcggagattctcgcgcgcacttaagtcttgatcgattgccgctgtttgattggtgacactaaactgttggcacacttggcggctttgtgttatcgtatcaaagccatttaatgtgattgtgccactatctggtcgtaggagggtggtcattatttttaagagcgttgttttcccggcaccattgggccctaataatgcgaaaatctcacctttagaaacggctagcgaaacggaacgcaccacttttttggtcccaaatgctttttgaatattgtttacttcaatgacatgctcactgcacataatattgcctcctcatttaataatcaggtcacctgattaatttatatagtaaggtcacctgattaaaatgtcaaggattgctactcttagattttggaatggtgtatactaattaaaacagcgaagggaagatgacgtatggcaaagagtgtcaaggccgaattggtcgccggaaaattagctgaatatgaacaactcagtaagatctacgatgatatcgttaaacaagcacgcccgcatttaatcgtcgaaggccaggggaagattctattggcacttgctgatgaagatcacttatcgcaacgtgaactagcaacgcgtttgggaatgtcacctcaatcaaccagtgaatttgtcgctaaactcgctaaacgcgagctggtgacgttaagtaagctcccaagtgatcgccgggttaatttagttaacttaacggatgccggtcgtcaagaaattgaaactgccaatcaagaggtgccaccgtttgtgaacgccttgaccgaggcagaactcgaccagttagtgccactactcaacaagattacaacggcgatgtatgccgatatcgatgcctcaaatccgacgttgggcgttaagtttcataaattattggccggacgatatctgaaacaatttaaaaaataaccaaaaaaatagcgcgtctcacttaaattagtggggcgcgctattgcatttaattaatcaaagtcgtaatcactatcttccatcgcttccacattccctaagcgataaccattcccaacttgggagaagaaatcgtggttggcagttgaagtcgacatcccattcaagatcacggggttcacatcttcagcgctatctgggaagagggcgccttggccgaggttcattaaggctttgttggcgttataacggaggtaggttaatacttcttctgtccaaccagtgccatcataaacttcgtgggtgtatttttcttcgttggcatataagtcgtacagtaaatcatacatccagttttgcaattcttcttgttctgacttatccaattcattgaaggctaattggaacttatagccgatgtaagtcccatggactgactcatcacggataatcaatttaatgatttcagcaacgttggccaacttattgttccctaagtaatagagtggggtatagaaaccagaatagaagaggaaggtttctaaaaagacgctggcaattttttgttgcaatggtgtgccgttttgatagatatcgttaatcttgttggctttgtattgcaagaattcattcgtgttggtccagtcgaagatttcatcaatttcagttggtgtgtttaacgttgaaaaaatggatgaataactcttcgcatgcacggattccatgaattgaatgttgtttaaaacggcttcttcatgttgagtgcggatattggcttttaagctggccatcccatcttgtgattgtagcgtatcaagtagggttaaaccgccaaagacatgcccgacgatccatttttcattgtctggtaaactgcgccagtcatctaagtcattggaaaggggaatccgcgtatctaaccaaaattgttcggttaatttttcccaggttgctttatcaatttgatcttcaacttggttccagttaattgcaatataattttctgccatgttcatgaactccttttaacgtgcttcttttttaggtatgtaggccagctgacgagcagctggagtggagatttggtgcttgctttgaaacgtgcttttcaagctaactttctgcgcttagcccagtgaatcaaatcatcgactacttcgctaattcgcttccctatgctaatgctcaaaatataaacgcctgccgtcgcactctgttttgaaacgtgctttttgaaactgacttctgcgcttagttacactcgtcaaacaactgcttatagcagttattcgccgagttagactaatgctcaaagtcaaaccgtttcaaacgcactctagattacacaactttcgcatgcgtttgcgccgacttcactttcgtcgtctgtgtaagtccggatgtagtagattgatttaatccctttgtggtgggcgtagtttcttaagatgtttaagtcccgggtggtcattttgtcagtccggccgtttttccattcgtaaaggcctgctggaatcgttgaacgcatgaagagtgtcatactcatcccttggtcgacatgtttttgtgctgctgcgtagatgtcgatgactttacgcatgtcaatgtcataagctgattcataatatggcatggtatcgtttgaaagacctggggcagggtagtagattgtcccaattttcttttcttgccgatcttcaatccggttaacaatcggttgtaagctagcagaagtatcattgatgtatgaaattgaaccgtttggtgcaacggctaagcggttttgatggtataaaccgtcttgcatgatggctagttttaaagcttcccaatcggcttttgtgggaatcataatgtccttgaaaatcgctttgactttgtccgtcttaggggcccagtcttcagtgaggtattgatcgaagtaactaccatcagcatacttactcttttcaaagttggcaaaggtcatctgacgttccttagcaatcttatttgaagcaacaagtgtccagtagtttaaaagcatgaaataattactggtaaagtcgattgattcttctgacccatacatcatgtggttcttggcaaagaaggtatgcagacccatgccacctaaaccaatggtgtgggccaattcgttcccatgagccacagaagggaccacatcaatatcagaatgatctgtgacgtaggttaaagcacgcaccatggcttcgatagaaccaccaaagtcaggtgacgtcatcatgttcggaatattcgttgaacccaggttacaactgatatccgtccctaacacgtcatattcttggcggttattaatttgtgacggggtttgcacttggaggacttcagaacagaggttactcatgatgatcttcccatcaattgggttcgcagcattggctgtgtccacattgacgatgtaaggataacctgattcttgttgcaatttactaatttcattttctaaatcacgggctttaattttggttttcttgatgttatcgttggcgattaagttgtcatattctttggtgatgtcaacatatgagaaaggtacgccgtattctttttcaacaccgtaagggctgaataaatacatatcagcatcagctttcaccaattcatagaacttgtcggggacgactaagcctaatgagagggtctttaaacgatatttttcgtctgcattttcttttttagcacctaagaaagcaatcacatctggatggaaggcgtttaaataaaccacgccggcgccttgccgttgacctaattggtttgagtatgagaaagaatcctccaataacttcatgacagggaggacaccacttgctgcaccgtcgatgcctttgattggatcgccagctccacggaggttcgacaagctaatcccaaccccgccaccaatccgtgataattcaagtgccgagttaatcgtccgaccaattgaattcatatcatcggttgtttggagtaagaaacatgaaactaattcaccacgccgtgaacgcccagcattcaaaaacgatggtgttgccggttgataacgttggtggatcatttcatccgctagttgcagcgcaagggtttgatcaccatctgcgaagtagagagcattcacaaaaacgcgatctttaaaatcttcaagataaaagccattgtcgtttgtttttaatgcgtattgcgcatagaacttataagcagccataaatgacttgaagtggaagtcttggtcctttaaatattgattcaattcttccatgaatgaaagagaataagccttcaaaaaatctgcttcataataattttccgcgactaaataatctagacgatcttgaagtgatttaaacgtcaccatattgggttgtacgttttgttccaaaaaggcatcgagtgcttcttgatccttttgtaatggaatttgaccattcactggaatattaatttggttattcaattcatagtatgttacatcttcggttttaatctcttttaaagacatccttgccaccactttctagtcatattagctgttttagggtttaaaaaaagtgaagaccaactctttagtaatcaagagtcggcctcacccgttaaaactgggaatgcatggtgcttaaatcgccaatttttgcaattccgctggtctaaagcctgagaagctttctaggccatccgcttctaaaacgggaacggcttggaaaccttgttccttcaagtaatcaatatattgtggttcgtcattgatgttatgttcaacaaaaggaacgttgtgcgtttctaaaaagtgtttcgtcatccggcattgtgggcagccgttcttagtatataatgtgatatttgccataatcgttaactcccttgtatttctcttatcgataaaaatagtataccgttttgaaatggaagatgcaatcaataaacaccacatattgtagataaaacaaaaaacgaccactaattatagtggtcgtttacgaatgttcatttgattgtcttgggcaacgtcctgcacttaagttaaacatatttatgggtaaagtcaatccctgctaatgcgcaaaatttttcaaaagcacgccggacaaagcttaacagattttaaaaaattttttagattgggattaatttaatattgcaccatcataaaaatgagttaacgaacattttataaaattggtgaaagtaaccgtgaaaatttttgtttaaatttcaaccaagttgactgttgggcgattatttcgtctgttagtagggatgctttttccatatcagcctgatagatcgcttcaagttgcgctgcaactttcggatcgtaaataaacgtattggcttcaaagttcagcttgaaactacggatatccatattggcagaacctacagtgctgatatgcccatccatgaccgccgtcttagcatgtaagaatccatcttcataccggtaaatcttaacgccagctgcatgcaagagttgactgtagtattccgttgcacggtagatgaaggggtgatccggcatgttaggcgtcatgatacgaacatccaccccggacattgccgcagtcgtcaacgcatcaataatactatcatccggaactagatagggcgtttgaatccataagcgcttcttagcggtactaatcatcttcagataaccgagtttgatttgttcatctaatttatcgggaccacttgagacaatttgcatggctgctgatccacgattttgggattggtccactgggaagagttcttccgagtaagttaacttaatcgcaggctcaacgctcgcgttccagtccatcataaagcgtacttgtaaggctaacacggcattgccggtaatccgcatatgggtatcacgccaatgtccgaatttcttactccggcctagatattgatcaccaacgttaaagccaccaatataaccaatcttaccgtcaattaccacaatcttacggtgatcacggaagttcaagcgaaaatcggtaatcgtgtgttttgaactgaagaacgttcgcgcgtggccaccgacatcttcaagtgtgcgccaccatttttgcgttgcgccttgggagccccaagcatcgtagacaacgttgactgaaacgccttctttggctttttgaatcaatagttgttgtaactcattgcccaatcggtcattatagatcgtataatattcgatatgaatacttttttgagcttgtttgatgtcggcaaagagggcgtcaaactttgcttgcccgtcagtatagattttgacatggttattctttaaaacgggtgcattattaatatttaaaaagagattcaccatttcggatgcttcactggaaagcatctttttcggtaagaggtcgtttttacgattttccttacgttgaatgtcgaccaatgcggaaagcccatcatcgatttgcgattgactttggaaaatctttttccgcgataagccccgtccggtaaacatatataggataaaaccgcccacgggtagtaaaattaagactagcagccacgcccaggtggccgcaatatcgcggggctgtctcaaaattgtaataattgccaataaggcattaatgaagatgatgaatgacattatttctgtaactaaaaccatatcgtactcctccaaaattctagcgttgcttattattttactaaaatcacgctcaaagcgctagttaagcctatcaacagtcagttaaatgaggtaatccctgttgggccagatggtgcgccccctgattctgacgctctggaatccattggtggatgaccattgaatagggcgcctcaagtgctagaatccggtcgacggcagcttgataatgtttagcataccgcttttctaggctctgaaagacaagcttgctgtcaacgttaatctgtagtattttcgtggtaagcccccgattggctagttgttctaagccaagaatgaccgccgcaaattctgcatcatgattggactgttctggcaaaggtgcttgtagttgatattgtcgctctggtgtcacgattaaaattcccgccgcacttggtccgggattgccacgagttgctgcgtccgtataaagtttaatcattcttaaaatttaccgcctttcactgacagcagggtcaggttaatggtatgatacaaagcgtaaaaaggagtgttctcatgcaaaagacaaccaccgcattctaccaaccaaattatgcttacttcgtgacgatttggtcttggattggcttcgtctatacattagctttaattgtacaacttgaactcatcaacttaaactggcaatcgtggggcatcggcttaattgccgtttggttgacgctatgggtcattttcgggcatcgtgtttcaatgacggcagacgtgatcacgcttaaacggccggtatttaaatataatcgaaccatcaaccgtgaaacgactacgaccattattgtccaaaaacatggtttattaattaaaaccaacgaacttgattaccaacccgaacaaatactccttagtcgcaaagccaagcaggcattcgttaaacaactgaaacaaaatggttggccaattgaagaatagttaaataaaaaagagccacgacaaacattaatcttgtcgtggctcttttttagcgtttaaacgtatttttattctgctatcttttgcacgttagctgcctgcaaaccgcgggcgccttctttaatctcaaataataccggctcgtctttattcaatgatttatagccgtcggtttggattgcggtaaaatggacgaaaacctcctcgtcatctccataactgatgaagccataacctttagcattgctaaaccacttaacgattcctcgttccatcacaatccctccttgaaatgttaatcagcgtacgcgcttattttaccacgtacaaagaagtgtgtcgaagaatatcgttctttttaagcatcccatctgccaattccgtacgtaatcagctatactaggtagtatcataaataaaaaggagctgggcggtatgtcagatattcaaatagcacaggaaaatgaagcgaaggagatgcagccaatcacggcaattgccgaacaagctggtttaacggccgctgatttagaacaatatggaccgtataaagcgaaggttaatttcgctgccattaatcgattgaaagaaaaagaagatggcaaactcatcttagtgacctcaatcaatcccacaccagctggagaaggtaaatcaaccgtgactgtcggtcttggcgacgcccttcgtcaactagatcaatcagccgtcattgctttacgtgaaccttcactaggccccgtcatggggatgaaaggtggcgcaactggtgggggctatgcccaagtggtaccaatggcagatattaacttacattttacaggggatatgcacgcattgaccgctgctgtgaatactttagccgccctaatcgataaccatctgcaacagggaaatgccctcaacattgatccccgccgaattatttggaaacgggcgcttgatattaatgatcgtgcattacgccaagttgtcattggacttggtggtccagtgcaagggatgccgcgccaagatggttttgacattaccgttgctagcgaattaatggccattctctgcttagcaactgacattactgacttgaagcggcgcattagccaaatcgtcattggttacacttatgatcggcaacccgtcacagttggcgagctcgaaatcaccggtgcaatcgcgatgcttttaaaagatgccctcaaaccaaacctcgtccaaacgcttgaacatacaccagccttaattcacggtggaccatttgccaatatcgcccacggctgtaacagtattttagcaacccaaacggccctaaaaatgggtgatattgcgattactgaagctggcttcggcgctgacttaggtgctgaaaagttcctagacatcaaagtcccacaacttggcaagactccggataccatcgtgattgttgccactgttcgggcgttaaaatacaacggtggtgttgctttagctgatctaaccactgaaaatctcggtgcgttagacaaagggtttagtaacttagccaaacatattgctaatatgcaacgttacggcattcccgtagtcgttgccatcaatgagtttacaagtgataccgaagcagaggttacaatgctccaagaaaaatgtgctgaactgggtgtcaaagccgttttagctagtgtttgggcacatggtggtaaaggtggccttgatttagcccaggccgtcttagaagcactcgatcaacctaaaaacttccaaccattatatgattcaaacgccgacattcaatcgaaactaaccacaattgtcactgacatctatggcggtaaagaggttgttttcgagggcaaagctatcaaccaactgaaagaaatcgaaaaaaatggctgggaccacttaccagtctgtatcgccaaaacacaatattcactctcagacgatccaaaagcattaggcgcaccaactgatttcaccgttcacgtccgtgaattgattccaaagcttggcgcaggcttcatcgtcgcaatgaccggcacagtcctcaccatgccaggtctaccaaagaaaccagccgccctcaacatggacgtcacagaagatggcctgattagcggattattctagagtgcgtttgaaacggttagcttctgagcattaatagaatttgacgaattgccgatacaatcggcgatttggcaaatttggttaagcacagaaagttagcttgaaaagcacgttttccaatatcctaacgcccatctcgaaaactgattgacaagtcagccgattttaaggacaatggtagattgtatgaataggaggttcccatgctcatctatatcgttttagccgcagtcattgtactcggtgaccaacttttaaaaagctggattgttgcccatgttgcctttgcagcaacccaacccgttattccgaacgtactgagtttaacgtatgttcaaaacgatggggctgcgtggagtatcttggctggtcaacagtggtttttctacctcgtcaccattgtggccctcggggtaattggctacttattttatacctctgatcgcactgaaaaattttaccggatcggtttaacgttgctgttagccggaacacttggtaacttcatcgatcggctccaccttaagtacgtcgtagacatgttccaaatcgaatttattaatttccccatctttaacgttgcggatgttgccttaacagtaggcgtcatctgcgtctttattgctattttgttgaaagagaaagtgactcatgactgaaactaaacaattaacgattacaactgaaacaggccggattgataaggcgctcacccaattactacccgattactcacgttcacaaatccagcaatggttgaaaaaagacttggtgcaagtcaatgatcaaccttgtaagagtaaccgcaaagtcgtaacaggggatgtcgtcaccgtcaatattccagaccctgtcacgctcgacttaaccccagaagatattccgctcgatatcgtctatgaagacgatcaagtcctcgtagtcaataaaccacaagggatggtggttcatccatcagctggccacccgaatgggacattggtcaacgctttattggtgcacaccccattgtctgaaatcaacggcgtcttccggccggggattgtccatcgaattgataaagatacctctggtcttttgatggtggctaaaaccaacgaagcccacgaatctttatccgcccaactcaaagctaaggaaaacttacgtgaatatatcgcgctagtccacggcaacatcgaagaagacgaggggaccattgatgcacccattggtcgttcaaaagtcgaccggatgaaacaagcaatcgtcgaagatggccgcccagcggtcacgcattttacggtcatggaacggtttgaagacttcacattaatcaaatgtcgactagaaactgggcgcacccatcaaattcgcgttcacttagcctatattaaccggccagttgctggcgatcccgtttatggtccccgcaaaactttagctgggcatggtcagttcttacatgctgctgtattaggctttaagcacccaacgacgggcgaaatgatgcgctttgaagccccattacccgcaatcttcgagaaaactttaaccgaattacgtgaaaatcattgacaaatcaaggattctccgttaagctaggtttaacttaatagaagcctttaaaatcggtcccgtgaggccgagaaggtacggtgaaagcaccactagacgcggagtctctaactgtaacctctcgaccttatcggtttgagaggttttttgtttggaaggagtctttacgatggtcaaagaagtggtcgacagtaacacaatgaaacgggtctttactcggattacgtacgaaattatcgaacagaataaggggatttcagatctcgtcctcgtcggcattaaaacccgtggcgtgtttattgcccaacggattgcagaacgcctcgaacaattagaaggcatcgcattgcccgtcggtacactagacattacgttataccgcgatgatcaacatgatcttgatacacaaaatgaaccacagattaacgggagcgatattcccgttgatatcacaaataagcatgtcatcttaatcgacgatgtgctttacacagggcggacgattcgggccgcgcttgacgccttaatggacttaggccggccaaagaaaatttcattggctgtcttagtcgatcgtggtcatcgtgaattaccaattcgccccgattttgtcggtaaaaatattccaaccgcgctcaacgaacaaattagcgttgcgatggaagaaattgatcaacatgatgggattaccatcgaaaaactaactaaataacgactgaaccgtttaattgtctccagagagagcaaaagggtttgtcttgaacttagtgcgcctaaaaaaaggggcctaagtccgtcaagggacacacctaccaatctgttggagcgtgtgtctttttttggttcaaaaagtcgtcgacatggaggaaatacttatggctacacaatttagaaatcccgatgcggtcttagacgtcaacgaacgacccagcaccggtaaatggattggtttatccattcaacatatgtttgcaatgtttggctcaaccgtcctagtgccaatcttagtcggtttaaacccagggattgcgttattcagttccggggtcggcactttaatgtacctcttgattaccaaaggcaagattccagcatacatggggtcgagtttctcattcatcgtgccaatgctcgctttaatgaaaacgactggctatcctgggattgcacaagggacaatggcggttggggcagtctacttaatcgtttcaatcttagtcagtctgattggttccgactggatcgacaaagccttaccacccattgttgtcggcccaatcgtgatggtgattggcttatcactcgctggcacagctgccaaacaagccactatcaatgcccacgggaattacgacttaaaattcttcgcagtcgctttactaacgttgttaatcaccatcggctttaatatgtatctcagaggattcatgagcttagtccccatcttgctcggcatcattgctggctacatcatcgccgtcttgttcgggatcgtcgattttcaacccgtgatggacgccccttggtttaaagtaccagacttccaagtcccatttgtcacttacaaacccggtctgtactggggcgcgattctcagcatggcaccaattgcctttgtcacaatgaccgaacacatgggccacattatggtcttaaacaaactcaccaagcgtaacttctttaaagatcctggtcttcaccgcacgttagccggggacgggacagcctcaatcatcgccgcttttgtcggaggaccgcccgtcacaagttatggtgaaaacatcggtgtcctcgccatcaccaaagtccacagtgtctgggtcttaggtggcgccgcattcttcgccatgatcttcggcttcatcggcaaactgagcgcgttgattcaaagcatccccacacccgtaattggtgggattagcttcttactcttcggggtcatcgcctcaagcggtttgcgcgtcttaatcgacaaacaagtcgattttgataagaaacgcaacttaatgattggttcatcaatcctcgtcatcgggattggcaatgcctacttacaattaggccaataccaattctcagggctagccatcgccaccgtccttgggattgtcttaaaccttgttttaccggataaagcaaagagcgaacttgaattggaggctcaacaaaatgcaaaagcataacgcgttggtttccgttgatcaactcaccaatgatttagtcgcaggtctcatcaaccgcgctagcgcctttaaaaagggcgcgacaagcaaattaactcggccggtctacgcaatgaacctattctttgaaaatagcacacggacccatacgagtttcgaaatggcagaacgcaaactcggcatgaccgtcttagacttcaatgccgatacgagttcgacttccaaaggcgagaccctcagcgatacgctcaaaacggtacaagccattggcgtcgatttcgttgctgtccgccattctcagaataattattacgacgccttactcgcagatgatcaattccacatggcactggccaatgcgggcgatgggagtgggcaacacccatcccaatgcttactcgatttaatgacgattcacgaagagttcggccactttgtaggcttaaaagtcgtcatctgtggtgacttgcgtcattcccgggtggcacggtcaaatatgcaactgctcaaacaactcggcgcaacattgtattttgccggccctgaggaatggttcgcccctgaatttgcccaatacggacaaccagcccaactcgatgacgtcttaccagaagttgacgtcgtcatgttactccggattcaacacgaacgctttgctgccgatgaaaccttatctgacactgcattccatactcagtacggtttgacaactgagcgggcagcacaccttaagtccagtgctatctggttgcacccagcacccgtcaatcgtgacgttgaaattgccgacgaactcgttgaagccccacaatcgcgaatttttaaacaaatgaccaacggcgtttttatgcggatggccatcattgaacacctattagaccaacaacatctgattcaacattaagagggggatctgctatgtatcaattgatcaaaaacggccaagtcttgattgacggccaactgcaaaaacgcgacatcgccatcgatgcaaccggtcagattacggcaattgaaccaacgattaccgcagtcccaaccgacccagaaacgatttatgacgcacacggccatttcgtcagtgccggcttaatcgacggacacgtccacttcagagatccaggcttcacgacaaaagaaacactcaaaacagggagcgcagcggttgcccacggtggttttactagcgtaattgcaatgccgaacttaaagcccgtacctgataacttgctagatttcaagacactggttgcacgcaatcaggcagaaaccagcgtccacacatatcaatttgcaccgattaccaatgagttaactgaacaaacaattgtcgacatgtcggcgtttaaggcagctggtgcagcaggctttaccaacgatggtcatggggtacaaacggcacaaacaatgtaccaagcgatgcagatggccgcccagattaacatgcccatcgtcgcgcacgtcgaagatgaatcactcgtcaatggcggcgtcattcacgacggtcaagccgctaaaaaactaggcgttcccggaattgcgagtgtcagtgaatccgcccaagtcgcccgggatatcgagctagcgcgggcgaccggcgttcattatcatatctgccacatctcaactaaggaaaccgtcaatctcgttcgccgcgcaaaacaagatggactcaacgtcacttgcgaagtcaccccacatcatttgttactcgatgattcagcgattaccagtgacaacgcaatgctcaaaatgaatccgccacttcgaacacttgcagatcgccaagcactctgggcgggcttaatggatgggacgattgatattattgcgaccgatcacgcaccgcataccacagaagagaaacaacaggcgttattgaaagcgccatttggtatagtagggagtgaaacagcctttagcttgctatacacgcatttagttgccaacggtccatttagtctcgcgcaactgacaagctggctaacaaccaacccggcccatgttttcaacttaccacacgccggccagttagcggttggccaaccagctgaccttgctgtttttaatttaacggataccaccacaatcgacgcaaacactttcttatcgaaaggccacaacacgccatttatcggcgaagcagtgcaaggtgatactttattaaccttggttgctggtcagattgcatatcaaaaggagtgtgtcatcaacgggtaacttctgagcatttacctgacttggcggattggtgttgcagacaccgatttgacaagtgtcgtaaaggacaagaagttgttgatgaaagcacgttcaaaaaaggagtgaactaaaagatgaaacgttaccttattttagaagatggcaccatcttccccggcaccggttttggcgccccaattatctcgacaggcgaaatcgtctttaacaccgggatgagtgggtaccaagaaaccattactgatcaatcatacaacggccaaatcatcgcttttacataccctttaatcggtaattacggggtcaaccgcgacgactttgaatcgattaaaccaacctgtaaaggggttgtcgtccatgaaacaccacgcctagcaaataactggcggatgaatatgagtcttgatgactttttaaagcaaaagaaaattcctgggattgccggcatcgatacgcgggcactcactcgccgtctgcgcgataaagggaccatgaaagccagcatcgttgatgccgcagacgatcacgcgttcgatcaactcaaggcattggtcttaccaaaaaaccaagtccaacaagtctcaacggccaaaccttatccgagtcctgctaacgggcggaacatcgtcgtgattgactttggcttaaaacatagtatccttcgtgaactgtcaaaacgcgactgtaacatcactgtcttaccatacaacacaacagctgaagaaattctgagtctcgatccagacggcgtcatgttaaccaacggccctggtgatccagaagatgtgccagaagccattgaaatgatcaaagggattcaaggtaaagtgccgattttcgggatttgtctcggtcaccaactttttgccctcgccaatggggctaaaacctacaagatgaagttcggccaccgtggtttcaaccatccggtccgagaagttgccaccaaacggatcgacttcacatctcaaaatcatgggtacgccgtggatgccgactccatcgacccacaaaaccttctgattacacacgttgaaattaacgatcaaacagtcgaaggtctccgtcatagacaatatccggccttttccgttcaattccatccagacgcagcccctggtccacacgacgctgcacatctattcgatgaatttatcgacatgatcgatgacttcaatcgccgccaaaaatagtaaaaaggggatttagtgatgccaaaacgtaccgatattcataaaattttagtgattggctctggcccaatcgtaattggtcaagccgccgagtttgattactcaggcactcaagcctgcttagcgcttaaagaagaaggctaccaagtcgttttaattaactcaaatcctgcgacaatcatgactgataaagccgttgctgatacggtttatatcgaaccgatcacgattgactttgtcacgcaaattctacgcaaagaactcccagatgccatcttaccaaccctcggcggccaaaccggcttaaatatggctttggaactggcaaacaacgggattctcgccgagctgaacattgaattgctcggtaccaagctcagcgcgattgatcaagctgaagaccgcgaactgtttaaaaacttgatgaatcagttaaacgaaccgattccagaatctgcgattgcccattcactcgttgaagcccaaacattcgttaacgaaaacggatatccggtcattatccgtccagcctttacccttggtggcactggtggcgggattgccgaaaatgccggtgaactgagcacaattgtcaaaaacgggcttagcctatctccagtcggacaagtcctcgttgaacaaagtattgccggtttcaaggaaatcgaattcgaagtcatgcgcgacaaaaatgacaacgcgctagtcgtctgcaacatggaaaacttcgacccagtcgggattcatactggcgattccatcgtatttgcacccgttcaaaccttaagtgaccgtgaagtccaaacattgcgcgatgccgcacttaaaatcattcgcgccttgaagattgaagggggctgtaacgttcaactcgcccttgatcctaatagcgaccgctactacattatcgaagtcaatccacgggtgagtcgttcatcagcccttgcttctaaagcaactggctatccaattgcaaaaatggcggctaaaatcgccatcggtttaacacttgatgaaattcataatccaatcaccgggacaacctatgcgcaatttgaaccgatgctcgattacgtcgttgcgaagattccccgttggccatttgataaattcaacaaaggtgatcggcaactcggcacccaaatgaaggccaccggtgaagtgatggccattggacgcaacattgaagaagcattactcaaagccgttcgctcacttgaaattggcactgaccatctcgaaattccagcattgacggcagtcggtgataacgaccttgtccaacggattgtacatccccaagacgaccgacttttctaccttgccgaagcattgcgccgcggttattcaattcaagaacttagtgaattgacaaaaattgatcttttcttcctggataaactcagccacattgttgaaattgaagaacaactccggaccgataaaggtgacttagaattactcgaactcgccaagaaaaatggctttgccgacgctaaaattgccgcaacttggcaaatcatgcctgcccaagtccgccaaatgcgccaagaaagtggcattcagccagtttataagatggtcgatacttgtgcagccgaattcgaatcacaaacaccttattactacgcgacttacgaacaagaaaacgaaagcattgtcagcacaaagccttcaatcttagtgattggttccggtccaattcggattgggcagggggttgaattcgattatgcaaccgtccactgtgtgcaagccatccaaaaggcgggctacgaagcaattatcatgaacagtaatccagaaacagtttcgactgacttttcaatttcagataaattgtacttcgaaccactgacactagaagatgtcctcaatgtcgttgaactcgaaaaaccagaaggggtgattgtgcaattcggggggcaaacagccatcaaccttgccgaaccactgaccgaaaatggtgtgcagattctcgggacaagcgtcgcgaacttaaaccgcgctgaagaccgtgaccaattcgatcaattaatcgccgaactcgacattccacaaccagtcggggcaaccgcaaccaatacgccagatgcgttgaagattgctgaagagattggttatccggtcttaatccgacctagtttcgttttaggcgggcgggcaatggaaatcgttcatactgcagaagaccttacacattacatgaaagaggccgttaaagtttcagtcgaccaaccggtcctaattgaccgctacttaatgggcaaagaatgcgaagtcgatgccatctgtgacggcaaagatgtcttaattccgggaattatggaacatatcgaacgcgctggtgttcattcgggcgattcaatggcggtttatccaccacaaaatctgacggatgcggaaaaacaagccatcatcacttacacgaccaagctctgtttagcacttgaatgtcgcggcttgttaaacatccaattcattatccaaaatgaagcagtctacgtgattgaagtcaatccacgggctagtcggaccgttccattcttgagtaaagtcaccggcatctcgatggcgcaactggccacccaagtcattttaggcagcacactagctgaattaaagagcccaaccggtctattaccagcgggcccactaattcatattaaagcacctgtcttctcattctcgaaactcacgcgggttgatagcttactcgggccagaaatgaaatcgaccggggaagtcatgggaactgacgtaacgatgcaaaaagcactctataaagcgttcgaagctagtgggatgcacttaccaagtcacgggaacgtcttaatgacaattactaaccaagataagacacaagcgctcgaattagcaaaacgcttccgcgaagttggctatcaaatcattgccacgcctgggactagtcaagaattccaagcagcaggtgtgccagtgcaatccgttgccaagattaatgctacgagcggcgatttacttgataaaatcaaagccggccacattcaactggtcatcaacacaaccggcttgaacgaagccccacaagtcgctaaagacagcatcgtcattcgccaaaccgccattgaacacggcattccattgatgacctcattggataccgctgatgcgatcttagcggtcctagaatctcaatcgctcctgaccaaaccactttaaaaccactaaaagagtctgaagccctttgcctaaggctcttttattacataaaaatcagaaggagtctgctaaatgttgccattagaataccaattaaccctcactaagcaaaccgaaattgcccccagtatctatgaattatgcctcaccggagacctcgcacagcaacccgttgcaccgggacaatttgtcgatatcaaaatccccagtgacgcccttttattacgtcggccatttgggattgccaatgtcgaccgccaaactaacacgattaccttgttataccgcgttgttggtgaaggcaccacgatcttaagtgaatcaccggtgggcacaagcttgtccgtcttagggcctcttggtaacggttatccaattgaccaattagtagccggacaaaacgcgctaatcattggtggcgggactgggattccaccattacatgaactctcacggcaacttaatgcaaaaggcgttcacgttcaacacgtgttcggctttgcaactaaagcagccattttctatgaagatcactttcgcaagctcgggccagtcgcttatgcgacaaatgatggctcgtacggctaccaaggccatgttggtttattactcgatgcacagtttgctgatgcgacaacccgatatgatgccatttacgcatgcggaccaaaaggcttgttaatggccgtcgataatcgattcagtgagcatcccaatgcctatatctcattggaagaacggatggcttgtgggattggtgcctgctacgcctgtgtcaccaaactcaaacgtgatccaagcattcagctcaaaatttgcgatgacggacccgtcttcaaaacaaacgaggtgctcatttaatgacagacttagcagtaactttaccaggcttagctttaaaaaatccgattatgcccgcctccgggtgttttggcttcggtcaggaatacggtcgctattatgacctcaacgaacttggcgcaattattatcaaagcggcaacgaaagaaccccgacttggcaatgcgacaccacgggttgctgaaaccccaagtgggatgttgaacgcgattggcttacaaaatcccgggattgaagtcattatgcaagaaaaattaccctggttagccgagcattatcccgagttaccaatcatctccaatgtcgccggcaataccgaagctgattacgtcgctgtctgtgaacaaatcagccaagcgcccaacgtccatgccatcgaactgaatatctcgtgcccaaacgtggcccatggcggtcttgaatttggcacatcaccagaagccgctgccacgttgacgaaggcctgtgttgcagtcagccaagtgccggtttacgtgaagctctcaccaaacgtgacggatattcgtccgattgcgcaagcagttgaagcagcgggggcagccggcttctcattaatcaatacactggtggggatgcggattgatccaaaaacacgccaaccaattctcgctaatcaaacaggcggcttatctggaccagcgataaaacccgttgccatccggctcattcatcaagtccgttcaatttcgaaattaccgattattggaatgggcggtgtctcaacagctgcggatgcacttgaattaatggccgccggcgccaatgccatcgcagtcggcactgctaatttcagcgatccatttgcctgtccaaaactaatcgccgcattaccagatgaactcgctaaatatcaactaaccgatttaaaatcattcggtctaccacaggagggcactcatgactaaccctttaattatcgcgctcgactttccaaactgggaaacaacagatcgttttttagtgcaatttccaactgatgaatccttattcgttaaagtcggcatggaacttttttaccaagagggaccacagctgattaaaacgttaaaagcgcgcggctatcggatttttctcgacctaaaactctatgacattccaaacaccgttcaaagcgcgatgactgttatcggccaactcggtgtcgattacacaacgattcacgcagctggtgggcaggcaatgctcaaagcaggggcggctggtctgaaaaaaggcgccgcacttggcaacgtgcggcccgctaaactactagcgattacgcagcttacgtcgaccagcgaagcgcaaatgcaaaccgaacaactcgttaatgtcagcctaccagaatctgtcgcacactatgcgcaactcgcacagaactcggattgcgatggcgtggtctgttctgctcaagaggtgccaacgattcgcgaacacaccaatgctgattttctctgcgtcacacctgggattcggccagcaacaagccaaaccaatgatcaaaaacgggctgtaacaccacacgaagccgcacaagctgagagctcggcgattgtcgttgggcgcccaattacgcaagctacaaatccatatcaagcttaccaagctatcaaatcagaatgggagtctttcaaatgacaacaattgcacaccaagtcgcacaagccttaatcgatattcatgccgtcagtctcagtcctaacaacccttttacttgggcgagtgggctaagaagtcccatctattgcgataaccgtttaacgattggttatccaaaagtccgcaagctcattgccagcaacttagctgcggcaatcaaagcgcaattcccagacgttgaagtcatcggcggaacagcaaccgcggggattccccatgctgcatgggtcgcagccgaactcgacttaccgatggtttacattcggtcgaaaccgaaagatcacggtcaaggccgtcaaatcgaaggaccgtttaaagccggtcaaaaattagtcctcattgacgatttaatttcaaccggcgggagtgtcttacaagcagcggccgccgctcaaaaagagggcgcagaagtccttggtatttttggcatcttttcatacgaactagcagccggccaacagaatttcgcaactgctaacttaccactaacgaccttatcgaatttctccgccttattagcggtcgaagaagccgctgataacttaactccagaacaagccacatcactcaatgaatggcgccaagacccacaagcatggtcagacgcccattagaatagagtgttaaccggaaagtaatggcttgcagaacacgtttagcgtgtgccatcagccgcaccaatcaaagaagcgttaccccaattcactttggagtaacgctttttattagtcttgcacaggtttgttacgtagcttttgaacgagttgctcgtctggtgtcgtataaagtgtttgttgcccttcgtaaatcacaaaccctggtcgcgcaccgttcggttttttaatcttcttaacctgaatataatcaactggcacggccgctgataagcgcgccttcgagaagtaggccgctaagttgccggcttcttgaagcgtatcttctgatggatctgggctatcaataatcacatgagacccgggaatgttcttcacatgcaaccagatatcagttttatgggcttttttcaaggttaattgatcattttgatagttattcttgccaacgaaaatccgggtaccatcactcgcatagaaaacttcaggttcactaatcttgtaacgtttctgcttcttggcaccggttttcttagcctttaaataaccttcagcctgtaattcagctttgatatcctctaaatctttgggttcagcaatttcaatttgcgccataatcgtgttgaagtaggcaagttctgcttcggtctttgccatttgttcattgacgtaggcaattgaattccggagcttctgatatttcgagaaatacttctgcgcattttttgaagggctaatctggttcgacaaggtaatcttaagcggttcgttattgtcgtagaaattgggcaacgtgacttcagtcatgccacgttcgacttcccgcaaataggtggtcaaaatttcacccttaatccggtaatcatcagcactgtcggctgcttttaacgttttttgtagttttttcagtttcttttcatccttttgaatctcgttgcggatgaagtggatgagcgcaccaccttgttgctgcactcggtcacgctgcgccttgtgtaagtaatattggtctaacagctcactcaacgtgtcaaaatggctcagtgtccctgtcaggctctcataagggaaggccgtgaaccacgacttcttttcaccaactgttaacgttggtgtcacttggtcgaattgcttgaagaaatcagtcacaaccgccaaataattgtcatgatccattaaacgggtttgtagttcaacggcactttcacgactcatcccttggaagtgttgttgtaaccatttgacttgttcatcagcagcttcgttataataacttaaccaatcaagcgtctttaaatcagtcgtaaaaccatcaaccccggttgcagccggtggactaacataatcggcaccaggcattaagaaccgataacggttttgcgaaacaccgacgtgccggattaaatcgagaatcttattggtcgcttgattaatcaaaatcacattactatggcggcccatcaattcaacgattaagcatagttgttgtaagtcccccagttcattccgtgatttaaatgtgaatcttagaatccgatcactttcaatttgcttgatgttttctaaaatggcgccatctaaatacttccgtaaagacatcgcgaagttcggtggcgttgcggggtttgcataaggcacccgcgtcacttgcactcgcgcataagatgggtgggctgataggagaaggggataggtcttacgatttgcccgaatcgttaagattacttcgtttggataaggttgttgaattttcgtaattttgccgtctgctaaagttgtatttagctcatttacaacggcgtgggtcattaaaccatcaaaggtcattattgctcacactctctataattgaattgtcttacttattgtaacggttttgcagtggaacctcaaagaaattagttgtttgcaatcgctaacacgactattgtataatacaattatcaaattgctttatacaattaaagggggatttaccgtgcgctcaaccttagcaacgtttaatcaactgaatctattgtatcaagaacaaaagaaacactgggcgctacgactcgacttgaagttagcccaagtcaatattctaatggccattgaacccgatcaagaacgcatttcgcacgcagaattaaccacgttaaccaaactcgatgcatcgacactcagtcggcagttaaatacgatggctcaagaagggctgttaacaaaagtgaccggggctgatccgcgccaacgcgtttacgcattaacaccgaccgccaaaacggcattaagtacgttgcaacaacttcaaactgaacttgaaaatcacattcaacaaaactggagtaccgatgaacagcaacttttaaaaatcctactgaaccgttattatcaaagctttaatcgaccattaaaatgagacgccctatacatttttcggaaaatcggcatttttaggggaattaacctaccatttatgatatagttattaccgaataataaaaaagtaggtgtcaccatgaaaattgctgtagtcactgatagtaccgcttatctcacagaacagcaagtgaaagaccatcatctcttcgtcgtacctattccggttatccttgatggccaggtctatgatgaaggcgttgatataaccactgaagagttctatcaaaaattaaaaacatccgaaacattccccagtacatcacaaccaccactgggtgaaatgttaaaactatacgaagacctcggcaacgaagggtatgatgctgtcatcagcatccaccttgctagtaccatctctgggtttgtcacgacattgaaaaatgcggcaagcaccatcgataacatccaggttgtcccatacgattcagggattactgtgatgttaatgggctacttagcaatggaagcggccagaatggcacgcgacccagaagtgaccgtcgaccagattatcgcacgccttgacgatctaaaaagcacaatggatgaatgtttcattgttaacgacttacaaaacttagtgcgtggtggtcgtttatcaaacgcatctgcttttattggtagcatgttgaagattaaaccgcttttaacgtttgacgctgacactaacaaaattacggcatttgagaaggttcgttcattgaagaaggcttacgcccgcgctgaacaaatttttgctgaaacagccgaacgtgttgactatccattacgcgcactaatcattcacgctaacgatgaaccagcagcgattgcatggcgtgataagcttcaagcaaactatccagacttaccaattgatatcagctactttggcccagttatcgggacccatcttggtgaaaaagccattgcacttgcttggattaaagattttgataaagcctaatttaaaagcctgtcgaacaattcgacaggctttttttgtgacttataagatagaaacgggttcttctaaggtaaccaacttcgtcccaattagcttataaataacggatttaacggctactttttgaacaatgttgagcggttcctcgtttaaattgaattcattaaccgttgattgcgcgttaatattcgcaatttcggcattaaataaccgcacaaactgatcatatgccttaccagcggtgtcgtttgccaacgattgcgaaatcccttgtttaatgacatcgagcgggaaaactaatttcataatgctgaccacaatcaattcggctaaatgatcccgattatagcgtttcttttccggtcgttcaataatcgccattttgacatagctattaatcattgttttcgttattttaacgtccaacaaaggactcagtcgtttattgacctcactaatgacttggtccatatagaggtctaaatctggaaattcagaccataatggtaaccgcaattgttgaaagtcacccaaccatttttcaaattcttgtgattgcatactgattaacgccaccaatctgttgatagtatatttattatgccatagcaattatcatttgtcactaacatagaatcgaattctattatctattgacttataatctacattcgcgctataatactcggcaaatagagaaaaagaggcgagaaccatgcaactttccacgattaaacgacaacaactgatttatgaaatatggaatgccattacccacgggattggttttttcggtagtttaacgttagtcatcatgctcctggtcaaaagcattcataaaacactctcaccagtcgcgattgctagtctagcagtgtatggcgccacattactgctactgtatctcgcttcgactttatttcactgcttagcatttaccaaggccaagcgcgtgtttcaaatattcgaccatagcaatattttcttgctgattgctggtacctacacgccatattgtttgatttttattggccatgcaacaggaattagcttactgattgcaatctggacactagcgattgccggtattataacgcacattttgagccacggtcggtaccaaaagattgaaacaacgatttacgttgtgatggggtggttatgtttattagctggtaagaccctttatgtcaacctcagtccagttggtttttggctgttagtcagtggtggcgtagtctttaccgttggcgctctaatttatagttttcctaaaattcctggcttacatttgatttggcactttttcgtaatgctcggaacgaccctgatgtttttttcaatttacctcaacatttaacttgaaggagtacaactcatatgacaattaaaattgtaacggactcatcgattcaactaacagcagacgaacgcgccaaatatgacattcacatcgtccccttaacgattcaacaaggaaatgagtctttcattgatggacaaaccattacccgcgctgaatttttaagtcgcttacaaaatgcaacgaccgattttccaacaacaagtcagccaactgtcggcagtttcgtcgatttatatgatcaattaggggctgatggtagtacgattctatcgattcattgtaccggcttgttaagtggcacaatcgaaggggcacacacagcagcccaccaatcaacaagtgacgtacacgtgattgatagtaaagcaatcgaccgtggacttgcttatcaagtggttgctgccgcccaagacgttgaagcagggaagcctcttgatgatattatcgcgcatctcgatgacatccgtcgtaaaaccgaaacctacgtctttttagattcacttgacgcgcttcaacgcggtggtcgaattagtagaatggccgggctattaacgaaaatcattaaactcaaggtaattgtgcgcttaacagatacggaattagaagtcgtcgcaaaggggcggggactaaaagcttttacaaaagaaatcaacaatatccgtgaatacttagccacccaagacgttgcggaaatcggcatctcacacgtcggaatcacggatgaactatccgctaagatccaagcaacgcttgaagaaacacagccccatgtgccttatacagtcgcactaaccagcccggtcattatgagtcacgttggcctaggggcgtttggtattttctatcggacaaaataacagctgacaagaacgtctcattcgaggcgttcttttttattgccccttaaaattgcgcaaaatctagttgcgttatttcaaagaatcgtttatattagaatgaacgttctaataagagaggagcatccagatgcggacaaaaacatttgaagcaccggttgtcttagacaaagccatgcttgtcttttggcaacaaggctatgagaatacctcaatgcaaaacctagttgatgcaatggggattcaccggcgcagtatttacgatacattcggcgataaacatgaactgtttatccaagtactagcacattatcgtgaccaaattaacgagcgtttcgagcaagtactggcaacacataccgatttaaggtcgcgcttaacagccatttttgaaatatttattgaccatccggataaccaaccagccggctgcttagtggtgaataccgcggcaacgttaaattcattagaaccagacatccaaacgctgattcagcattatttaacccaagaaaaagcactgttgcaggcattactgattgccggccaggccgaactagaaccgtctgttgcaattgatcttttagctgcatcgcttcaaagtgcgctcattggtatccgggtcatggctaaagtgaacccagattcaactacgctaacagcaattgtgcaacaaaccctacaaacactcccgtggaaagaggttttctaatatgaaagcagctcaaattaaaaaatataatcaaacactagctgtcacgattcaagaaattgatcgcccacaaccgctagccaatgaagtactcgtcaaagtcgcctatgcagcggtgaatccattggatccaatgaatatccgcggcgatactaaattaatgcaaaactatgctttaccactgactttaggcaatgaaattgccggtgaaatcacagcgattggaacagacgtcactgatttcaaagtcggggatcaagtctatgcgcgtttaccattggctaaaatcggtggctttgctgaatatgtcgcggttaccaccgatgcaatctggtacacgccaaaggatttatcgctacgtgaagccgttgcaatcccactgactggcttaacggcttatcaggggctatttgaggaattggcagcccaaccgaaccgaacgctgtttatccctggtggttcaggcggtttcggtccaatagccgtcccaatcgcaaaatcactaggcttaaccgtgattgtttcaggcaatgcagccgcgcgagatcacattttgaatttgggtgctgaccaatatatcgattacaaaacaaccgattactgggaagttttagatcaaatcgattacgtgattgatacacgcggtggagcagatattgaacgtgaaatggcgattatgaagccgggcgggcggattttaagcttgattgccggtccaaacaaacaattcgctaaacaattgcaattaccattttggaagcaactcttattctcgttggccgggcggaaatgggatcgcctcgctaaaaaagcgggcgttgaatatcgctttattttcgttcgttcagatggtgcccaactcaaaaaaatcactgaaattgttgaacaacaagcgattgtaccagccatcgatccgcatcaattcgatttagcacacgttaaagaggcattagaacttgttgctcacggccatccaactggtaaagtggtgattaaggttcaagcgggctaatcaagatgacttatctaacaacccccaaccaatttattcaagatcaacaaggccaacggtttgcttaccgcgaagtgggtaccggtcgcggcttaccacttgttttattgaatcacttatcagccactttagataactgggaccctgcattaattgacctgatcagtcagcaacgacgcgtgattgtctttaataatcgtggtgttggtttctcggatggcaaagtccccacgacgattgagcaaatggtagctgattgttatgcttttataacagctatgcagctcactcaattcgatttacttggattatcgatgggtggttttattgcacaggccttcactttaaaatacccctcaagcgttaatcacttaattttagtcggaacaggtccccagggtgactcagaaatcgccaaagtggggcgcataacaacttttgacttaattcggtccttcttaacgcatagagacgttaaggaatacctcttcttcaccagaacgccccaaggcaaacaggctggtaaagcgttcattaaccggttaaaacagcgtgaaattgttgaagataaagccattacgttagccacttatcgtcgtcaattaatagcaattaaacagtatgcgcacgatcaaccggcaaacctggcacaaattaaccaaccaacattgattgtcaacggcgatcacgatcgaatggtacctgttaatggttcatatgaattacatgaacggattttaaattcccaattaaaactttacccagatgctggtcatatggcgttattccaaaatccaaatgactttgcagctttgttggctcagtttttaaatcactaattacagaagcgtcattttaatatggcgcttttttgctgcgcttaaacgctggtgacgagtgggtaggcttagttaattttttaaatctattttagtttacataatatatattatgcgaagaaacgcttatcccttgaaagagcgctaaaataaccacttattatccaacatcattcaattgatttgatgaaccgcacttaacgcgtttgttttttacactgcacgattcataaactattacaagttactcaacgccaatatgatgaatcaaactgactggccaaccgatatcgccaaacttaactttaaatgcagaattcatctaagctcaggcacaaatccgtgattaatctgacgattatgccagattttaattggtaaatacgcatattaacacatcttagccttaaaactcacatatcaaatcgttaaaaaaggccttaaacgttgatataccagcttttaaacggaataaggatctttaggttgctatgcagatagtcgaataagaccatctgatcatcagtttgcggaacggtttgcaatacaagtgttgttaaaattatggttttaacaacacttgtagtattctcacctcatttttgctaaactatctttaaactgctaattaaggagtcttccatcatggatcaacaacgttacttagaactctgcgaaaagcaactcgccaatcttccggattacattcgtaaattctacattaaccgccaggcaaacgcctactcttctgcaacgctctatcaatacttacaagaatacgttcgctttttcacctggttagttgatgaacagatcgtcgtggtcccctctatcgaccagatgccactgaccgcactcgaaaaaatgaaactcgaagatattgagctctacaagatttttctaatgaataagcgtaaacaaaataaccataagctctcctttcaagccgttaaccgctcgattaacgcattaaatgcgctctggtacttcttaaccattgaagccgaacaagctgatggtgagccttatttttaccgaaacgtcatgaagaaggtgaaactacttaaagcttcagaaacaatggcgacacgttcacgacacatcagcaaacaactgctgaccggtgaaaagaaacacgacttcatcaccttcatgcaagttgattaccctaacttgctttctaatcgccaactggcatcatacaagcaaaattgcgaacgcgatattgccatctgtgtactggcgctggcaacgggcatccgactatcagagttggcccaagccaacatcaacgatttgaatcttgaacaacttacaattaccgtgatccgtaaaggcggacagcaagatactgtcccaattgctccgtggagtttaccttttttaagggattactgccagattcgtaaatcacgctatctaaaagaagataatgaacaagccttatttgtcagtcgctatcgtggcagcgccaagcgtatgagcaactatgccattgaaaagttagtcgcgaagtattctgaagcatttggcgtgcgtctcacaccacacaagttccgccatacacttgccactgatctcatggcggcaactcatagtgaaacaattgttgcgacccaactaggccaaacgaccacgcaagctactcacttatatacgcacgtcgttgctgatgaacaacgctcggcaatggaccagcttgaatagccactattagtgctcttcttggcaacgattatcaatgtcgttctaacagtcatttggtttacatcaattcgtcgatttacacattgcttgacttataccagctatcgagtatactgaaagcgttcttaaaaattaaatgttaaccatcgcaaaggggagccattggctgagagtgattttaatcagacccttcgaacctgtttgttaagacaagcgtaggaattgtgatggagttgaaatgataactccttttttgtgttggttgaacaagaaaaggggttatttttatgcaacatcagcgtctattgattcagattgaaggggcaatcatcgcggcatttgccgtggcattggaatacatcccccatacagtggggccttccgcaatcgaagtctcctttgggattatccctattgtaatctacagtttacgccgtggtgccattcctggaatggtctccggcttaatctggggtctactagacttaatcttacgtggattaggaaacggtagtgtcttgaacgtatggcaaggattgctagaatttaccattgccttcatggttgttggtttagcaggtatcttacaacgacctattcaagcaagtattcaaaatcatacaaaagtcaaaacgatgacccttttatggatggccgcattttttggtacttttgcaaaatacttctgccacttcttagccggtgccgtttattggggctcatacgctcccaaaggtatgaatgcttggctatactcgctcactgttaacggtggcagctttatcgctagcttcattctaaccggcatcgttctatgtatttgtttagccatggtgcctaagttatatttaccaaaagacatggttttacacgtacaatctgaaaaataaacaaaaaaagagccgtattaacacttgaatggtgttaatacggctctttttaattcccttaacgatccgttctagctcgtaatgcatataagattgaaactgtatcgacaacctcttggaataaagcccccactaatgctggaacaatcccggtgctggcaatcaacattaacccaatacagattgcaatcccaatcaaaaccgcctggcgagcaacgcgcatcgtgtcacgcgcgatttgaacggcacgactaacccgtcctaaatcatcttttagaatcaccacatccgctgattcacttgcggctgttgcgccatgggcccccatcgcaatcccgacatcagcacttgccagtgacggtgcatcgttgaccccatcaccaaccataattagtgggcgttggtcttgcggtacttgttcaattaaatgaatcttatcgactggcagacagcctgcatggacgtcatcaattccgacttgttccgcaatctggtgcgcagttgtcgcttgatcgcctgtcaacatcatcaaacgcgtaatccccagttgatggagcgtctgcatcgtggccggtgcttctggtcgtaaatgatcgataaacgtaatgtaccccgcatattgatcattgatcgcaacgtaaacagtggtttgttcttgcagaggctgttgcgcatctggcgtcacgaattgatgtttcccaacacgaaccgtttgtccagacgacagcgtcgcaactaccccagcgcccgttgcttcttttaatgtttcaattggttgtaattgttctacctgtgccgctttaacaagtgaccgtgctaaaatatgcgaagattcttgctccgcactagccgccaattgcaataaatcggttggtgcgataccaatcactggcacaacttggtcaaccgtcaattgaccattcgtaattgttccagttttatcaaacgctgctgatttagcagacgctaatttttcaattgttgtgccagccttgacaataatcccgtttcgactagcacgactcatccctgagattaacgcgataggcgctgccaatattaatgggcacggcgaagccacgacaagcacttctgcaaaccgtactggatccttagataaccaccaagctactccagcaatcacatacgcaactaatgtaaatggcacggcatatcgatcagctaagcgcacaaaatgcgctggttgtgccgcagaggtctctacaagccgtacaattgcttgatattggctattaacggctaattggtcaacttgcatggtaaccgacgtatcgccgttcacagagcctgacatgagctcatcatttagtgctttttcaacggggcgtgattcacccgttaacgatgattcatcgaataaagcacttcctgcaataatatgcccatcaacagggaccaattcgccaggtttaataatcacttgatcaccaacttgaagcttatcgactgaaacatcttcgaccgcatcattaacaaggcgatgcgctgtttgcggagaattatcaagtaatgtctttaactcacggcctgctttatgcgctgcatagtcttccaatgagtcgccaccagttaacatgaccaagaccattaatgccgcccaatattcaccgaccgctaacgtcgcaataatagcggtaatcgctaatagatccaccccgtattgaccagattttagcgttttaatcatctcaataaacatcgagagcgctactaagctccccgctaaactcactaaaatctgtgcccacaatggctcatgtagcaaaaacgccaagcatagcgcaatcacacccacactaattgttaaggcaaacttgatggtatgtttcatcgtcaatcgctccttcttgtgaattcatttacattataacacatttttagttagattagaataattccaatctgatggcacacaaaaaaagccccccaaattaatgaggggggcttttttgcagatagttggtttataatagcagtctgcacggcagtcatcgctgctaataatagagtcattcgtttcatcacgggtgatgtttttttttgattagagagtgctttttcagttttatgaataatcgattcaatcggggcttgtgcctcgactaaggcttcgactgttatgtctgtgtgcccgttcaataaatcacgaccaacttctaatgcgtaaagcctattttttaataaagtaaattgagccgaacccgctacaaacttcagctgactcttttggcaatttcgaattgtcgcttcaatcacttgaattgcatcaatgctttcctcggtcatttacctatcctcctaataaaaaaataaagccccgaaggactttattattaatcgttattaaaatgcttctgttaattgtggaaccacttgtttcttacgtgaaacaacaccggctaattgtgcacgatggttgttcaattttacgttgaatgctttttcaaaggcttctgctggttcaccgataacaagcgcttctgagttactgtttaagatgtcagtaatcaaaagtacgaataagtcgtaaccattagctttattgtctgcttcgatagcagtttcaaaagcagcttggcgtttgaagaccgcttcgatatcaactgtattcacttgatcgatacgcacttttttaccagccatatcgaatgttttagcatccgcttcaattaattcagcttcgctcttatcatctaagttagtgcccgcttttaacatttcaagaccatatgattcgaaatcaatatcagcaatttcagccaatgtcttaatcgcaatccgatctttttcagttgttgtaggtgatttcatcaacaacgtatctgaaatgatagcactcatcattaaaccagctaattgagctggaatttcaactttgttttcgttgaacattgataataaaattgtgctggtacagccaactggttcagcgcggtagaataatgggctgactgtttcgaagtttgcaattcgatgatgatcaacaacgtgcgtcactgttaaatctttgatatcggcaacactttgttggctttcgttatgatcaaccaacatcacactgtcaacttcactgcttgcttctttaatgatgcgaggggttgctgctgcaaaatgacgcaatgcatagcttgtttcttcattaggttcacctagcgcaacggcttctacgtcgtttcctagttgttgttgaagataagcaaacgccattgccgcaacaattgcgtctgtatctgggttttggtgaccgaatactaattctttactcatatttatacagaccttccttttaaaaaaataacatcctaattataccaaaaatattagacgattctacggttttgctctctaatccgtgttaaataatctttttcttctaaataatggtcgaattcacggaaaaagctattaatccgtggaatatcttccttttccttgcggaagacaaaagctaattcgaactgaatggccggatcaaattgaaccgcgtttcccttaagtcccaaattatgtgcttcataaaaactctttggtaaagctgtacttaattcagttgcttcagcaaaacgcatgatttcaaatggtgatgtgaattgagccgcactcactggacgatcaaccaattgattcttataggcttcactgatgaattgatttaaatagtattcatctgggtatgtcacccatttattatctaatgtatctttaaaacggatcttcttacgcgtctttaaagtaggatcttggctgataaagagtaagcgttcatccacaatcttacgtgacttataaggtttccagttcttaatgctgtcatctggcaaatacataatggcaatatcaattttattattttcaagtcggtcccagatttctttccgagtcaataagtgcatgctgacttcgatgtcaggaaattgtttatagtattgaattaagaaggattggataacactgctttccatcgatgctaaaatcccaatattaatcttaccgcgcgtcgcactcgttgaactttgaatttcatccgtcgcagtatttaataaatcatgaatctgatgggtagcatccaacatcgtccgaccagcatccgaaatatgtaacttcttgccgactgaataaaataaaggcgccccgactatccgttctaattttttaatctgttgggttaaagcaggttgcgtgataccgagtagttgtgccgcttgggtataattcatcgtttccgctaactgtaggaaataggttaatgttttagaggagaagatattttcttgtcttgttttcattttcaaatctccgttctttagtttacgcctatcattataataataaagatataaaaaaagagcaacccctttcgttgctcattcttattaaaggcttaaaattttcttatgttagcgttgctgctttggatagtctgctgtatgcaatagacgctccgcattgacaacgcgatcgtgggtcggtggttcaatccccgctaacggatatttaatccccatcttttcgtatttcacgattcccatcgtatggtagggcaacacttcgactcggtcaacattgtttaacgtttgaatataatcccctagacgagtgagatactcatcgtaatccgtccgttctggaatcaagacgtgccgaatccacatatgatgaccatgatttgacatatattcaatcatttctaaaatatgttcgttagaaaagccggttaactttttgtgccccgctggatcaatatgcttaatatcgaccattgaaagatcggtatatttcatcaattctttgaatttactaaagaagggttctttatacgtaaacggctgcccacaagtatccaaacaggtattaatcccttgtaccttacactttttaaataaatcaattaaaaaatcaatttgaattaaggattcaccaccgctacaggtaattccgccatctttaccccagaaggccttatatggcagtgcctttgcgattaattcgtctgcggtataagcttctccgctaccaatattccacgtatctggattatgacagaattcgcaacgcatgcgacagccttgtagaaaggcgacaaaccgaattccgggaccatccactgaaccaaatgtttcaatcgaatgaacatatccaattggcacctctggtgttatcggggtttctggaacaacattttcagttgataaccgtgttgtaaatttaattgccatttcactttcacctcttaaaagaaaagctatgctttctggtaaagtcgttaattcgcgttaacgaccttaccagaaagcggatattgctatccactttcgttagattacatttcgtcaaagaacgttcttgagataacgtcgtcttgttgttccttcgttaaatcagcgaagtagacacaataacctgaaacccgaaccgttaatgttgggtattcttctggatgttgttgtgcatccattaaggtttgcttattaaagacgttgatatttaaatgcatcccttgattaatcatgtaaccatcgaccatgttcacaagcgcgtctttacgtgcttcatcatcatgccctaatgtatttggtgtgacaccaaacgtatttgaaatcccatcagttgcataacggtatggaatcttcgcagttgaaagtaatgatgctaaagcaccgttcttttcagcaccgtatgctgggttagcacctggtgagaatggttcgccagcttgacgaccatttggtgttgtcccagtattcttaccatacacaacatttgatgtgattgttaaaacagatgttgataattttgagccacgatataaatgatgcgtattcatcttcgtatagaaagtcttcactaaccatttagcgatatcgtcagcgcggtcgtcattgttcccataacgtggatagtctgggttttgcgcttcgaaatcgactgccataccgtcttcatcacggataactttaacttggccgtatttaatcgctgagattgaatcaaccgcatgtgatagaccagaaataccagtcgcaaatgtccggtctaaacgactattcttcaatgccaattgtgctgattcatagtaatacttatcatgcatgtagtggatggtgtttaaagcattaacgtaaacgtctgctaaccaatctaacatcttatcgtatttacccatgaattctttgtaatcaatgatttcacttgtaattggttgataagctgggccgacttgagctttgcctaattcatcgatcccgccgttaattgcgtaaaggattgtcttagccaagttagcacgcgcgccaaaatattgaacgccgtctgcaattggttgtgcagaaacacagcatgcaatcccataatagtcactcccccattcattacgcatcaaatcatcgttttcgtattgaatcgttgaactcttaattgaaacttctgttgcatagcgcttgaaaccttctggtaagcgatctgaccaaagtaaggtgatattaggttctggagcagcacccatattttccaatgtcttcaagatacggaaggcagtcttagtgacatgatgacgaccatccataccaatcccacacattgataatgttgcccagattggatcacctgagaataatgaattataatcttctgtccgaatgaaacgaaccatccgtaacttcatgacaaaatggtcaaccatttcttgcgcttcagcttctgtaattaagccccgctctaaatcacgttggataaagatatccatcgttgtatcaatccggccaactgacatcgcagccccgttttgtgtcttaatagcggctaagtaaccgaagtaaatccattgaattgcttcttgggcattcttagcaggtcttgaaatatcaaagccatagctagcagccattttcttcatatcttgtaaagcacgatattgttcattgatttcttcacgaagacgaatgacatcgtctgtcatttcaccgtcgccaacaccattaaagtcacggactttttcttcagctaaacgatcaatcccatagactgcaatccgtggtaagtcaggaataatccgaccacgtgcataggcatctggaaggcccgtaataatcttgtagtgacgtgctttacgcatgtctggtgtataagcatcaaaaacaccttgattatgtgtcttgcggtattcgttaaaaatcttgtgttgttctggatcagtcttaaagccgtatgcttccaaggcatcttcggccatccgaatcccaccaaatggcatgaatgcgcgttttaatggggcatcagtttgtaatccaacaatcttttcaagatccttgtttaaataaccagggccgtgtgacgtaactgttgcaggattatcattgtctgcggctaaaacgccacctgcttcacgttcttgtttcttcaattccattagttgatcatttaacgttgttgttgcttcggttggaccagctaagaaactttcatcaccgtcataggcagtaaagttttgttggatgaaatcacgaatatcaatttcatcttgccagtcacctttgttaaagccgtcccaatagtcggctaagttaattttttcggtttttaccatgtggattacctccattagtcaagtgttgtttatcacagttttcacaattttagtataacacatcacatagtttatgcaagccctttctttttgattgtttagaaactcttaaactcttttgaaagattgatttatagctatttatctacttaaaatatttttataaccccaccatttaaattgtgcaaaacttattttgctgttatagtacaaaaccaaaaaatccgcatattatgtataacagaaaaaaacaagtcatcacatagatgacttgcttttttattattttgactcgtcttcatttttaactggaatagtcgtttgaacaaatgccggttgtccaacttcatcaacatccatcacaaaactaccgttcgaataacggtcggcagttgcatgttgataagggttaattgcaatcacttcttgctgatcagtatgaatcagtaactcgcttgcctgctcaacactaaccattgctgctacccgatgtggttctttcttcaattcacggagaattaagaccccacgacgcgcacgacttgttaaaccaacctcacttaagagcatccgtttaaaggcgccccgttgcgtcacaatggcaacggctgcatgtttatcttctggatgatataacgtaaagccgatgacaacatccccatctttgagatccattaatttgaccccactggccttagcacctgatacagagacttcagataaggtaaaactcaatccataacctttatagctagcactaaagacggctagcccttcatcacttggaatccagttcacgtttgtcacatgagcatctgcatgcaacttaataaagtcttgtgccttagaacgatatgttcgacttggcaagaggtcagagaaggcagtttgtttaatatagccatcatccgtcccaatcacaaagtagccagcctgttcatttggcttaaaggcaaatgctgcaataaccgcttcatcagccgccaaaccaatcgattgcgaaatatgttcgcccatttccttccatttcaaatcagcaatttcatgaactggtcgttgaattaaatgtccgtaattggtgaacatcatcaattgatctaaggtttgtagtggcttttgtaaaatggcaaaatcgccgtctttcaaaccgctgtcggccccttcagatgcttgatacgagcgcaaactactacgtttcaagtagccgtcatggctaactgcaaccatgacggtttcgtcaacaacagtcacacttgtatcaatttcaagcgtctcaatttgtgcttcaatttcagtttttcggtcactccgataagttttgaccattgcttttaactgcgccttaatcacccgtgcaagtgcttttggatcaccaagaatcatccggtattccttaatcgctgcatcaagttcagctgattcttgttccaaagcagtcacatcggtattcgttaaccggtataattgcagtgaaacaatcgcttcagcttgggcttctgtgaaggcgtagcttgccactaaattatctttagcgtcttttttattcttgctaccacgaatcgtcgcaatcacttgatctaaaatcgagagcgccttgattagccctgcgacaatgtgctgacgatccaatgccttttgtaaggtatattttgtccgccgaatcacgacttcttcttgatgttccaagtaggcatggaggatttctaataagccgacctgtttaggttgcatatgcgagatggcgaccatattaaagttatatgtgatttgcagatccgtatttttgaacagataattcaagatcccttgactatccgcttgctttttcaattcaacaacgactgataagcccatccgatcactttcatctcgtacttcagcaatcccatcgaccttctttaaaacgcgtaattcatcaatcttcttgaccatcatagccttgttgacttcataaggaatttcgctaatcacgatttgttcccgattgccgcgtaattgttggatgctggtttttgcccggacgacaactcgaccgcgaccagtttcataggctttcttaatcccatcgaccccttgtaagatcccaccagttgggaaatcaggtcctttgatgaaggtcatcattttttctaacgttgcatcgggatgatccaatagatagaccaagccatcagtcacttcacctaaattatgtggcggaatttcagtcgcgtacccagctgaaatcccagttgccccattcactaagaggtttgggaaccgagctggtaaaacagtgggttcttcagcggtatcatcgaagtttaaaacgaaatcaaccgtctttttatcgatgtccttgagcatttcaccagcaatcttacttaagcgtgcctcagtataccgcattgctgctggtggatccccatccattgacccattattcccatgcatttcaatcagtggttcacgtaatttccagtcctgacttaaccggaccatcgcttcataaattgaactatccccatgcggatggaaattccccatgacattcccgacagacttcgctgacttccggaaccctttatcataagtattcccatcgatggacattgcgtataaaattcgccgttgaacgggttttaacccatcgcgaatatctggtaacgcccgctcttgaatgatgtattttgaatagcggccaaagcggtcgcccatgacttcttcaagcgttagctcttgaattttttgtgcttcatcagccaaatttaatcactcacttttctattcgtctaattggtcaaataaatccacttcagcgcttgaagttgtcggtgctggttgaccattcgttgtatctaagatgctaccatcttcagccattgtgaacttaacgttttcttcaatccacttccgacgtggttcaactttatcgcccatcaacgttgtgacgcggcgttcagctaaggctgcatcatcaatccgcacccgaattaacgtccgactcgttggatccattgtggtatcccaaagttgatcagcattcatttcacccaaccctttgaaacgttgttgactgtagcctttacccatttctttagcgacgactttcaattcatcatcagtccaagcataggcaatcttcgtttttgccccagcacctttttggagcttatacaatggtggcaaggcaatgtagacttttccggcttcaattaacggccgcatatagcggtagaagaaggttaacaacaaaatttgaatatgggccccatcggtatccgcatcggtcatgatgatgactttatcgtaattgctgtcttcaagtttgaattcagccccgactccggccccaatcgtgtaaatcatcgtgttgatttcttcattttttagaatttcttgtaatttcgctttttgagtatttaaaactttgccccgcaatggcaaaatcgcttggaatttccgatcacgcccttgcttagcagaacccccagcagaatccccttcgaccaagtacaattcattcttcgccgcatttttcgattgcgctggtgttagcttcccagataataagccatcggatttcttctttttcttaccatttcgactttgttcacgtgctttacgcgcagcttcacgtgcttcgcgtgcttttaatgatttacgcactaaggcttgcgcaaattcaccattttcaagtaagaaaaagctcatttgttcataaaccaaactatcgacagctgtccgcgcttgtggcgagcctagcttacccttggtttgcccttcaaattgcaagagttcttctggaatccggacagacaagacggcactaagaccttcacgtacgtcggagccttccatgtttttatcccgttctttgagcaagtttaccttgcgggcgtaatcgttaaaagctttggttaagccggctttcatcccagcttcatgggtcccaccatcacctgtccggacattattcacaaatgacatgatgttttcggagtagccatcgttatattgacccgcaaattcgacttcaatgtcttctttggtgccttcgaaatataacttattaccaatcgtatctttatcttcgttcaaataatcgacaaatgattgaatcccttctgggtaatggaagacatcttcacgtgctggctcagcgcgtaaatcggtcaacgtaatcttgacatctttgagtaaaaaggcggattcgcgtaatcgttctgctaaggtattgtagttataagtagtcgtttgaaaaattgtcccatctggcttaaacgtaattaacgtgccgtttggttctttagctttgccaacttttttcaaggtaccaaccgggtggcccccattttcaaagcgttcttcgtaggcaacaccatcacgcacaacgcggacggtcaaccattcggataaggcattgacgacactcgcgccaaccccatgcaaaccgccggatgttttataactgttttgggtaaatttcccacctgcgtgaagcactgtcaaaataacttcaatcgtaggaatcccagattggtgcatcccagtcggcatcccacgaccatgatcacggacactaatactattatccgcgccaattacgacgttgatttctgaaccaaaaccagccaaggcttcatcgacagcgttatcgacaatttcgtacaccaaatggtgcaagccgcgaccgtcagttgagccaatgtacatgccaggccgttttcgaactgcttctagaccttctaagacctgaatcgaattatcattataatcttgtttttgatttggcattcaagtatgactcctttgtttaaaaatgaacagataaggtatattatcaacaagtttggatgattttacaatcaaaaatttaaaatttcttgccaatacaaatgtatgttcgtattcacctattctaacatacaatattccttttcccttgtcaaaatgctaaaataggggaaacaaatgccacaaataggagtttttgtcatgaaacttagtcttatctttattcttgcgtacctgatcggttcgttcccatcaggcgttattatcggccgcgttttctgtcacaaagatccccgagatgctggaagccataatatcggcacaactaactcgtatcgcgtgctcggcccaatcgctgggacagccgttttatttcttgatattttaaaaggcacacttgctgctagcctaccgatgatttttcacatccccaatcatgcattggtcttaatcgtcggcttagcggccgttgtcggtcatgcttactccatctttttacactttacggggggaaaagccgttgcaaccagcgcaggcatcttactggcatacaatccacttttcttcgtaattgccagtaccatctttatcagtgtcatcctgattacaagtatggttagcatggctagcatcctcggtccattgatgattgcgattttatcgttttacacgcatgattggctactcggttcgattgcgaccttggtcttacttttcctggtctaccggcaccgcgaaaatctacaacgcattaaaaatggcactgaaaacttagtgccatttggcctgtactatcgctataaacaaaaacatcaataactaaaaaaacgccgaacgggcgtttttttgtgcaatcagttaaagatcaatcaattgttcccgttcattgtaaaatgatcgataagctaagtaacacgcaatcactgaaccaagactcgttgccgataataacataaaggtcactaatatctggtacataatggccttgactggatcaattccggcaaaaatcaggcccgacatcatccctggcaggctaacaagccccatcgttttagcggaatcgatcgtgggtgacatccccgtacgaatactctcacgaacaatggcaattgatgcttgtttagcggtcgctcccaaggcgagtcgttccaaaacaggttgccgttcatccttaaattgcgccagtaagctgcggtaactcaagccaatggcgaccatcgagttggaagcaatcatcccagtaattggaataatttgcgatggaataaacttaatcgccccagataaaacaagtaatcctaacgtgaccccagtacttgttaaaattgcgataaatgaaattggaaacccgttgcgtagtttccccgcccgctttttggcatttgctgcggcgttaaaaataatgatcagcatcatcaataacgttagccacacatcgttaatatgaaaaatgaatttcagtaaataaccaacgataaataattgaatgattgcgcgaaaaacactgataatcatatctttttcaagaccgattttttcatggaagctaatgactaatgcgacaaacactaatgtcacagcaaacgtcagtgaaagaccattaacggctaagttcatcttgatttaccaattcgccagcaacaatttgcacctggcgccctttccgttgtaattcttctgtatcgtgggtaatggcaataattgtgagcccgcaatcctcattgaggtgctggacaaacgccaatacaattgccttattagcggcatctaaaccagtcgtaatttcatcaagtaataaaacttccggtggaaataaaacattacgaatcaaggcaattcgttgcttttcaccgcccgataacgtggtaatttttttcgttagtggcatgttggctaacccaaccgctgccaacgctttttcaattgctgccatatcgaccggtaaattacgaatctcgtatggaaaacgtaaattatccccgattgtttcaccaaataacgttgcttgttgaaaacaatacgaaaccttttgtcgatactgattgggactaaactgggtcagtggctgatcatttaataaaatggtgccacgtgtcggcgttagtaagtccgcaattaaccgtaacaaggtactcttaccacccccagaaggtcctgtaatcgttaagtaactgcctttttcaacggttaaattaatgtcggttaaaatcacttgttgatcaacctgataagataatcgttcgatttttaattgaatcataagtccctcctgacaattatttaattcatagtatacacgaaattcacttaattagtgtcttctgctgattgaaaaaaggacacctaaaagcttatactaatattaggatatattaagtgatggacgttctgtccgctctggaaaagagatgttgataatgttaaatagctttccgcaagtcatgacaattgccggttccgattctgatggcagtgccggtgcgcaagcagatttaaatactttttttgcccgtaatgtttatggtatgagcattttgacagcctgtgttgctggaaattcatatgggattcgtgctagccaagcactgtctcccgactttattgatgccgagtttgaagcaattgcagccgactttcaggttcgcgcttgcaaaacaggaatgttaaccgaccgtgagaccattctaaccgttgctaatcagttgaaaaaacatgactttggtcccctagtgttagatccggtcattattaccaagcatgaagcattgttgttggcagatgatgcttttaacacactaaagacagaattaatgccccttgcaactgtcctaacgcctaatttctacgaagcgcaaaaattaactggtattgaactgaagacacctgctgatttccaagctgctggccaagcactattggcaatggacgcaaaaaacgtcatgattaaaggccatcacgaggccggacaatcaatcgttacagactacgtttgccttgccgatggacaagaattttggctatcagaaccttacgttgaaaccacccatattaatgggacgggcgattcactttcagcttgcatctgtgctgaaatcgctaagggacagacaattgaggctgccattaagaccgctaaacaatttgttcaccgcgccatcgctaacccgattgaagtcggccacaagtacggtccaattaaccaccatgcttaaaatacaaaaaagcccacggaaaaatccgtgggctttttgaatgtttagtgttctgcttcttcaatatcggcattgacttcttgtaagtcaaagtcactctttaaaaaagcttcgttatcacttgggaagtgctgttcaaacgtttcaaacggttggagcgtcatttgagcatcgaccacggtatagtctagaatatgaccgccaaagtcgtgcgtatcgtttaagaagtgtacgtgatagcctgcaacagctgcgccttgataaagcgctggtgcataatacccaatcaacgtgcccgttacgtctgtttgttcaaactccggttgcactcgggttgcagcagtcaaattcggataaggttcctgttgtgtttggacggcccgcgtatgcatgactttgaaagtcccagtcattttaaccgcaaaaaacaagttttttaacggtgcttgcgctagaatttgcgtttctaactcagcctttgtgcgttgatgaaccgcttgtgtaggtaatgatgaatcttgccaatgcactgtcgcaaatggaactgtcgcatcaggtgcgagttcagtcacttggccatccccattcacagtataagcatggccatctaataagaccagttcgccagctaaaccgtgcgccgtcccgattccaaaattcccatgggttaataattcagcaacggtcattgtccctgtaaagagccccggaattaatagggctaacgttccgtgttgataaacgcgtttgacatcatttgtcattgattttcctcctcaaattaaacgagttggtcaggtaataatgcttggcctaataattgattatctttgtaatcaacgggcacatctacaaggacgggaccatcaatggcaaaggcttgatccaatactttaccaagatctgcggctttttcgacccgtaacccggttgcaccaaaactctctgcatattggacaaaatcaacgggaccaaacttaacggccgctgattcgccatatttcatttcttcttggaattttaccatgtcataataaccgtcattccaaataatatgcacgatgtttaagttcagacgcaccgcagtttctaagtcttgacctgagaataagaagccaccatctcccgaaaccgacacaatttgtgtatttggccgcactagagcagcactgatcgcccatggcaatgccacacctaaggtctgcatcccgttactaaagagcaagtgccgtggttcgtaacttctaaaatgccgcgccatccagatgtaatgactaccaacatcgaccgtgacggtcatttcgtcggtgacccgtgcttgcagttctgaaataatgttcaacggatgactaagtggattatcggtcgtcatttcaggtgccgtgtcacgttgattgagttctgcgtgcaattcaactaaataatcacgcacatcgcccgctagttgataccccttcatataaggtaataaaaagtctagggtctgcgcaatatcgccgaccaattctttttcaggttggaaattatgatcgatttcagtgcgcatatcatcaatcaccataatgtgcgcatcactttcagcgttccagttacgcggttcatattcgattggatcatagccgactgcaataacaagatcactgcgttttagaatgcggtcgcctggttgattccggaataaaccaactcgcccataaaaatcagtctctaaatcacgcgaaatgacaccggctgcttggaacgtttcaacgaccggaatgtgggtttcagccactaaattgcgaatcgctgctgtcacttctggtgaagaagcgcgcataccaactaaaagtactggtaattttgcttctttaatccgttgtgccaaaagcgtcgtttcaacgggactggctggccctaatttaggcgccattagcggtttaatcactttagaatgaacttctgagtccgtgacatcttgtgggatgctgacaaacgttgcgccctgtttagcggattcagcttcttgataggcgttagcaatcacttctgataaattctcaggttcttggacttccgcactgaattttgtgattggtgcgaataaagcggcattacgcatgctttgatgcgttagtcgcaacaaatcagcgcgtttcacttgaccggcaatggctaagactggatcaccttctgccgttgctgtcacgacccccgtcgctaaattactggcaccagggcctgaagtcgccattacaacgcctggtttgcccgtaatccgaccaatcccagccgccatgaaggctgcattttgttcatggcgcgtcaaaattaatttgggcgtctttggattaacgggatgttctagtcgttcaaaaacccgatcaatcttcgcacccggaatcccgaacacgtactcaacatcatgatttactaaactatcgatgatggcatccgcgccgtaatacttcttttcttcagtcatgacttaccctacctaacctatgattttataacttatatcttagcatggaactactggaaaaactagcagagtgcgtttagaatgcgttacccgcctacagccagtttactaaaaaaacgcactcaccatcttggtaagtgcgtttttttaatcattcattaacgaacagtaatttcataacttgcattaaacgtttcacctgcagccagttcgttgacaccaaatttttctgaaagttcaccgcttgcgtcaacggtatccgcaatcccccaccaaggttcaaggcacacaaggttgccttctgttggataaggtgaccaaacaccgatgaatggggcgccagccaatttcatggtcactgagtggtccgttttttcagaacgaatactgaattcattggcttgaccctttaattcgtagattaaggcgtcatttttaaataattggtgattgatatccgttgcgacgtcggttggtgctaacgtccggtcgttcaaattaatgaaggccccttgcaatgggatcttaacccgtgatttttgtgggcggtagtctaagaaataatcttcaaattgcgtgtcatccgttaatgggactttaaatcctggatgacccccaattgagaagtacattggcccgcttggcgcaacattgcggacgtcatagccaaccgtcaaatgcatatcatgaacacgatagctcacacgtaattcaaattcaaatggatacacggcccggctgtcagcgtctgctttcaacaagaaagtcacggcgtggtccgattgttcttcgatactgaattcgcgatcacgtgcaaaaccgtgttgacccatcggataggtttggccattatacgtatattggtctgcttttgaacgccccacgaatgggaataaaacgggtgcgtgccggccccaaacatcgggatcagcttgccataaatattcaagccccgaaacggcgcccttaatactttgtaattcggcgccttttggactgagggtcaccgttaaaaattcgtttgcaatttggatcatcttaaaataccaccttttaaaaattatagaataaagcgggttaaatctttatcggctgcaatattaccgatcttatcgttgacatattgttctgtgatggtgatatcccccatctgcatgtcaggaccttcaaagagaatatcctctaatagcttctctaagatggtggccaaacgacgcgcaccaatattatcggtatcatggttaacttggaaggcaatcgcagcaatgcggccaattgcttccatcgtgaaggtgacgtgcaccccatcggcgccaatcaacgccatgtattgttttacaagtgcgttgtttggttccgttaaaattcggatgaagtctttttcagttaaatcttcaagttcaacccggattgggaaccgtccttgtaattcagcgattaaatcgctgggttttgattcagcaaacgcccctgaaccgataaataagatatggtcggtcttcaaaacaccgtatttcgtattgacttgtgagccttcaacgattggtaaaatatcacgttgaaccccttcacgagagacttcaccagattgttttttgccaccagccgtaattttatcaatttcatcgataaaaataatcccggtattttcagcacgttggagcgcatcatggtaaatatcggcatggttgactaatttagcggattcttcttgaatgaaaacttcacgcgcttctttaaccgttaccgtccgcgtaatttttttcttcggcataattgaacccagagtatcgtttaaatcaattcccatctggcccatcatatcgttcattggggcaacttttttcggttcatcaacttgaatttcgatttcccggtcatctaacaagcctttatctaactgttctttaacagataaccgttcgttacggatatcatccgtcacttcttctggttcagtttgtccgaaaccagctggtgtttcccctttttgaagcgcgttaaacatgttcattaaatcattcatgttgttattgttcttacgttgttcctttttaatgcccggtactagtagtttaaccaagcgcttgtctgcttgacgagcagccttagcacgaacgtttttaaattgttctgtttcttccatatgcacagccacatcagctaagtcgcggaccattgattcaacgtcacgtcccacataccccacttcggtaaatttagtggcttcaaccttgataaatggggcatcgacaactttcgctaaccgtcgggcaatttctgttttcccgaccccagttggcccgatcattaatagatttttaggcgtgatttcttgttgcatttttgcactgagttgcatccggcgataacggttgtatagtgcaaccgcaacggcttttttagcttgatcttggccaatgacaaattgatcaagttcggcaacgattgttttgggtgttttattcattaagtccattgtgcgacctcctaaaatgattcgacaatcacgttgtggttggtgtaaacatcgattccaccagcaatatcaacactggttgtgacgattttttcaacggataagtcatcttttccttcaagtaataatgcggtagctgctgcttgggcgaaattgccgcctgaacccacggcaatcacttgatcacctgattccgatagcgtatcaggggtgatgacttcaccattccctgaaattaataaaatatcagtcgcattgaccgcaatcaacatcgcttctaatttttgaagcgttggatctttacgccagtcttgcgctaaagcaacagcagcatgttgcaggtcgcctgaatacttttctaatttttgttcaaaccattcttgtagcgtaaaggcatctgcaacaccaccagcaaagccgattgcgacttgattaccataaattcgacggacctttttagcagaatccttcgtcacaaatttttcgcccatggtgacttgaccgtcaccggcgatagctgttttaccattatgtttaactgcacaaattgttgtcatatgaattactcctaacgttgtttggggattgggcggggcttaacgtgcttttcaaactaactttctgcgcttagcgctgtgaatcaaatcagcgactttatcgctaattcgcttccctgtgctagtgctcaaaagttgaacaagcttgaaagcacttacttttttcttaacgtgctttcatcaactgctttctacgctttgctacatctgtcatatcaccggcgttgccggtaatccgcctgattaggcaaatgctcaaaaacaacccgttgatgacgcacttctttcttaacgtgcttttcaaaccatgttcttgcgtttagctacacaagtcaaacaattgcttccagtaatcattcgccttgttaggctaattctcagaacataaccggtttgaacgcacttctattttagcagtctttaagactgtgtgctaatattagtctatttttcgttgaaaaaaatcaaactttagtccgagttttacgcgcggggaaagaattggcggtaatctttttgtaaatgggctgtggtgacatgggtgtaaatctgtgtggttgataaactactgtggcctaataattcctgcaccgttcgcagatcagcaccgtgatccaataagtgagttgcaaaggtatgccgaatcatatgcggatgaatgtcactcgttaaacttgttttcttgataatctgatctaaaatgtattcaattccccgacttgtaattggcgctccgagatgattaacaaaaacgacatcgtggtccaattgttttttggccatcaattgaacacgaccaacttttaaataagcttgcaaggcacgtccagcatggtgcccgaatggtacatagcgatctttattgccctttccatgaacaagaatgacgcgtaagccgaaatcaatttgtgctaccgtcaactgcgcgcactcactcacccgcatccccgtcgcatacagtaattctaagatggcgcgattccgttgatcgagtggttgatccccatcaatggcagcaaatagcgcgtccatttccttttcgtaaaaaaaccgcggcagcttatgctgttgcttttttaattgaacagcttcaaaaggatcggtttgcacgaactcatttttcactaaataccggtaaaacgaccgcaaactcgaaattcgccgcgcgacagtttcacgactatattctttttgatccatttcattcaagtaagtttgcacgtccagtggcgtgacctgtttaaacgacgctaagccgccgttagcggttaaaaaagcactgaacatctgaatatcagcttgataagctttttgggtttctggcgagtaatgccgatcgaccactaagtactgtaaaaaaagattaagccattcttgttctaacgccaaaaaaatccctccaagcttgattagtattactttaccacaagcctggcgggatttaaaagattctaattaaagtgtcgtcttaaattggtcgatactttcaagtgcgcgatcagcaagtgcttggttccgttcctttttatcgcgaatccgttgtttcaaaggttcgaaaatcccaaagttcgcattcatcggttggaaatgtttagcactcgtatgggtaatataatgcgccattgatcccatcgccgtatccgttgggaaaacagccggtgtttggtccaacgccagtttagcggcgttaatcccagccactagtccagaagcggcactttcaacgtagccttcaaccccagtcatttgaccagcgaagaatagatcgtcacgttgttttgattgataggttggtaataaaacatctggtgatttcatgaaagtattgcgatgcatcacaccataccgcacaaattcagcattttccaaaccaggaatcatgcggaaaacccgtttttgttcgccccacttcaaatgtgtttggaaaccaacaatgttgtacaaactagcagccgcattgtcttggcgcaattgcacaacggcgtatggttgtttgccagtattcggatcttccaatccaacgggtttcaaaggcccgaataacatcgtcttaatcccgcgtttggccatcacttcgattggcatacagccatcaaagaacttttcttcttcaaagtcatgcatttctgcaacttcagcgctaatcaaggctttgtagaagttttcgaattcttcttcagtcattggacagtttaagtaagcagcttcgcccttatcataccgtgatttgaggtaaactttatcgaaatcgatactgttcttatccaaaatgggcgctgcagcatcgtagaaatacaagccatcactgccgtttaaggcactgattttttcagctaagccttcggacgttaatggaccagtggccacaatcgtaggaccttctggaaaatcggttaattcttcatgatgaactgtgacacgttcatgattggctaagcgatccgtcaccgtttgtgaaaacggtgtgcggtcaacggccaatgcgccaccagcaggaacggcattttgatcagccgcactgatgattaatgagtccaagtgacgcatttcttctttaattaagccaaccgcattggtaatttggttcgcacggagcgaattcgtacacactaattctgcgaattgttctgtatggtgcgccggtgtcattttaacgggacgcatttcatagaggtgcacattcacaccgcgttgggcaatttgccatgctgcttctgaaccggctaatccggcaccaatcacgtttacaaaaggttctgtgctcatttgctagtctccatttttctaattatttttggacggtttcttcgtagtcaccgtttggacaaattacttgtttgccacctttaattttcttttcaacaaggtagtgttcacacttcggacagtttctgccgacgggtttatcccatgtgacaaaatcacaatctgggtaacgatcacaaccgtaaaataagcgattcttcttcgatttacgttcgatgacttgccccttaccacatttgggacaggtgacgccgatttccttcacgattgccttggtattgcgacaatctgggaagcgactgcaagcgaagaatttaccataacgacccattttaacaaccattggggcaccacagatgtcgcagtcaaagccagctggttcatctttaatttgtactttttcgatttgttcactcgctttttcgacttctttttcaaacggtttgaagaagttgtcaatcaccttgacccagtcttctttacccgtttcgacttcatccaaacgatgttccaaatcggccgtaaagtcgatgttaacgatgtccgggaagaattcgacaattaaaccattgacgatttcccctaactcagttggttcaaagcgttttgcgtttaacttcacgtaataacgccgttgaatcgtttcgatcgttggtgaatacgttgatggtcgaccaacaccgttttcttccaaagccttaactaaattggcttcagaataacgtgctggtggctgcgtaaaatgttgcgctggatcagttttaacgagtttcaccgcatccccaactgcaagttctggtaagacattatccttagcagagtcttcagtatcacgtgatgacacatagagtttcgtgaatcctgggaacttcatttgtgagccgtttgccttgaataagacatcaccttgagcaatcttaactgcgaccgtatcaaaaatggctggtgtcatctgactggcgacaaaccgtgaccagattaagttatagattttatattgatcgttagttaaaacgtctttcaagctcttaggtgtccgcatcactgacgttgggcgaatcgcttcatgggcatcttgtgcaccttcaggattcttcgtcttatgcgcctttaatgccgcatattcttcaccataattgtcatggatgaattgtgacgcttcatgtttagcaccggtagaaatccgggttgaatcggtacgcatataagtgattaacccgaccgtgccttctttgccaccaaggttaatcccttcatacaattgttgggcttgcatcattgttttccgcgttctgaagttcaacttacggttggcttcttgttgcaaggaactcgttgtaaatggtgcggctgcaaaacgtttgcgttcccgtttcttaacatcttcaatcgtgaaatccttagtcttatcgatttgtttcaaaatcgcttgaaccgcatcattatcgccaaggggtaatttcttacccttcacgccgtagaaactggcgttaaacttactgcgactctttttaaattccgcatccaatgaccagtattcttctggaacaaaggctttaatctcgttttcacgatcaatcacgagttttaacgcaacggattgaacccgaccagcactcaagccttttttaaccttttgccagagtaatggactgattgaatacccgacaatccgatcaagcacgcgtcgcgcttgttgtgcatcaacgagtttcatatcgatactacgtggatttttaaaagcacttttaacggtgtctttggtaatttcgttaaagacaacccggtttttttcagttggatcgagttttaaaatatgggaaacatgccatgcaatcgcttcgccttcgcgatccggatcggctgcgagatagatatgatcaacttttttagcttgcttttttaattctttaatcgtttcgcctttaccgcgaatcgagatatatttaggttcataattattttcaaaatcaacacccatttgactctttggtaaatcgcggatgtgacccttgcttgcaacaaccttatagttgcgcccaaggtacttttcaattgttttggcctttgcaggtgattctacaatgactaaatttttgcctgccatggacaaacccctttcaacagaacgctttgttcaaatcgttcattagcataaaacactaccttgacgattgtcaactgatagtatgcttgatattaacagcttaaagcatagcataggtttggcagtatgccaaagagaaattgttttcaaacgtacaaatcacaccaaaaatcggggttcaaccacttggtcgaaccccgatttcttctattatatagtcgccagataaaaaacttagactgacaaactatttttttgtgcatcgcgttcaagaatccccgcaataatttgatcaagggtgatggttgccatctccgcttccgcagctttttgcacctgatcataagccgcatcaagggttgcttgaatgttgctaccaattaaacaatctggatttgttttttcatcaacgtgtaataaccgttgatctgtatcaagcgcctgaaaaacagctaacattgtaatctgttccgctgggcgcgctaatttaggggcaatcgtccccggtttagtcgctaataaatccgccttcaccagtagtgacattagccgccgcactaaactaggattagactcgatgctcccagcaatcgcttggcttgataaatcaccatcttgaaaagtatcgacataggccaaaatatgaatggcatcactaagtttatgagaatatttcatgattcaaccgcctttttgaaatcaattcaggcttatttaataatcgtctgtaacgcttcttttaatgaaggtaatggtcggcctaagacatcgggtaaatcagaagtggtttcatctaaatcaccatcttgaatcattgtttgaataccagtgacaatttcagcgacttcagcaggtaagccgttgtcttcgaggctttgacgataatcagccgcatctaatgatactaccttaaattcttgattagtcaactcgctaatcgcttgagctaaatccgcataagtggctggcgcaccggcaaattcataaatcgcttttggttgatcgttgactaataccttagccgcagcttcagcatagtcgtgttcgagtgcccaaccaacatgcccttcaccagcgccataaacaaatggttgacctgctaatgcgcctttaatgctatccatttcgttttcaagataccagttattgcgtaagaatgtatgatcaatgcctgatgctgccaatgctttttcagtttgaatgtgatcacttgctaaagcacctgttgcttgatcagcgtgtgggaaactcgtataagcaatccacttaacgccagcctttttagcagcttcaatcacgtttaaatgttgttgcgcacggggcacatcgccaccaggttgtgaggagatgaataataaccggtcaacgcctttgagtgattccgttaatgtggcaacatcgttatagtcaccgggacgaacggtcacaccagctgggaccattttagtggctttttcagtattccgtgctaatccaatgatttgttctgctggcactaagtcagccaacgtcttcattgcgacttgcccaaaacgacctgtcactgctgtaattgcatatttcatattaaaaatcccctttgaattccatttgttactttataagtaacttgtgactttaatattaacaacatgccgcagaattgtcaacaattaaccctcaatcaaaataatgcaactcgtccaataacaattgttgatttaaaagcggcgttgcaccggctaaaatcagttgattacagcctgccgataatgaatgattaacctggcccggtaaggcatatacgttacgattggcttgtaatgctaaattagcggtgattaagctaccacttttttggcgggcttctgtgaccactaaactatgacaaagtccggcaataatccgatttcgggctgggaagtggtgcttcttagccgttacgtccaaaccgtattctgatatcaataaccctttttcagcgaccgcctgttgcaagtgttcgttttgtggtgggtaataacaattcaagcccgttccaatcacgccaatcggtcgtaaccctttttggagtgcaacttcatgcgccatcgcatccgccccttgagctaaaccactgataatcgtcgttgtttgtggtaatcccaataaatgctgcagggcttgcttagtatactccgtggcttgccgcgcaccaaccaccgcaacacatggctgtttcaaaacacttaaatcgccgcgataaaataaaactgttggcggacaatgggtttctaacaaccgttgcggataatctgcttctagaatcgtcagatactgaacataacgttcatgcgtggcacacttctgttgcagagctagactgtcaaaactagtctgaaaggtcagccaatatcgctccggtaaacacgcaatctgcgcaatctccaatgccgataaagcccaattgtgactcgttactaaccatgcggctaagcgtaattcactgatggggccaaacccatctgccaggtgtactttcaataataattgctttttagtcaacacaaaaaaacagctcctttacgtttatcttcgtaaaggagctgttttattttctatagggcgtctttaacgggcgaaaaactgcggcggtgaattggcgtaacaccgaattcagctaaaccagcgagatgtttcgctgtcccgtaacccatattattagcaagatcgtaacccggatactgttgatcataattaatcatcaattgatcccgaatcactttagccacaatactggctgaggcgatactaatactgcgcgcatcccccttaatcaatttttcttgtgggatgtctgtcggcacggtcattgcgtccaccaataggtaatcggggtgttctgctaaaccagcgacagcttcgcccatcgccagttccgtagcgtgatagatattctcttggtcgatccgtggtgcatcggcaatcccaatgctgacactgatggcttgtgccatgataccgcgatacagttcttgtttcaccttaaacgaaagctgtttagagtcgttgacttgccataggtcaaaatcatgtggcaaaatgacggccgctgtcacaactggacccgctaatgggccgcgcccaacttcatcaattccagcaatcaagggataatctggccataaactttcttctagctggcgtcgttcgataaacgccgctttttgcgccgctaacttagccatccgcttgtcatattgaacgagtaacttctgcacgccagcacgcgcatcactgcgtaagagcgccacttcttcctctgaaatgtcgcctaataagcgtgccttaatggcagcaattgattctggtttggtcattagtgcgcctccacaggaacgatatcgagtgtaaagcgccctaacttacccttacgcgcgtccgtgatgaatttcatacagaagcgatcgtagtcttctttaaaacctagtcgtttggtcaatgccatgattaaatcaggcgctggcatttcaagttcagccggcgtcacatggtattcttttaccaattgttgcggatagaaatccttgaaataatcgagagcatacaccacaacatcatccgggtgataaattgcatccgaaatcgcaccagttaaggccaacttattgccgacagctggatcttcgaatttaggccataaaacccctggtgtatctaacaattcgagtgattggcccgcttttaaccattgttgattcttggttacaccgggtcgattacctgttaccgcaatgtttttttgcaccaagcgattcaaaatcgttgatttaccaacgttaggaaccccaacacacattgcacggatcaccggattaagaatcccttttgcccgttttttagcaagtttgtctgccaaaatttcttgtgctactttttcgatttgcggtaattttgatttatgttgcgcatcaagcgcgattgctgtaatcccccgttttttaaatgtttcaatccattgttgtgtgcgtttggcatctgccatatccgctttgttcataatcaagagcgtcggtttgttttgaccaagttctgcaatcatcggattaatggaagattctggaacccgtgcatccacgatttcgagaatcaaatcgactgctttgagccgttctttaatttgtttttgggcctttgccatatggcctggataccattgaattgtcataataactcctttattgctagttaagcgatatacatcattcttaatatttgtcactgattgtattattcttaattctatcatacctgatgtctggctgacgggttaaatttaatttcggactacaacatccaccaattaagcgtatcattttttcagttaagcatcatattcagtacatttcatacgatcattagcactcgataatcaaaaaagctgacacactctagagtatgtcagcttttaattattattttaaagattgtatatctttaatcggccagtagaccgccactgctcggcctaatattgtatcgcggtggatcgtaccaaacaagcggctatctttgctgatctggcgattgtcacccaatacaaagtactcatcttttggaatctgcttttcgccgattaaggtttttaattcaaaatctgatgttaaaatccctggtttctttttggcctgattcaagaatggttcgtcgacatgccgtccattgatgtacagctggtcattgcggtatgcaacggtttcacctggcagaccaatcacccgtttcacataatttgtttgatcagctcgggtgaagacaacaacatcaaagcgcttgatgggcccactagtgcgtaataagagttggtccgctgactcaagcgtcggggccatcgattgccctgacaccgatgcggggaccagaatgaacgaccgtaacacaatcgctaccgtcccagccagtaaaaatgcgagaagccaatagccggtaatggcccatccccgccacaatttctgcttcggggaagtcattaggcttgttcgctttcctgataggcttcatacgcctcatcaaaaatcgtcatactcgggaggtagatgccattaagttccaaatagcgcgttaatgtttcataatcgccgctttgtttagggaaagattggtcaaaaaaggcattgttggcaaattggggaactggttcataattattcggatcacgttgggtcatgaggtaacgataaaaactctgcttcatctgaacaccttatttcttattttttagcgggatatagacgtttaaatcaatcttatcattcttcaaatcgatatgtttagcagttacttgcatcccgttttcgagcttgaactcatttaggcgtaatgtaatccggctcttgtgtgcatccaaaataacccatttggggaatttgtattgacgcttgatgtaattaaagacaaacgacatgggcaccttcaattgtccgactgctaattgtttggcgcgtaattggacgtcgccattttctaaaacgtacggttcaaaaaagaggttgaattcgaccggaaaccctaagaacttgaattgaccagataaaatcgcctgctgatccagggtgagttggtatttaatctttgaatcttccaagtagttttgtaaataataggtgactaaactattgatttgtctcttatgcatctgaatttcaaaagtgctatcagctttgatgattttctcagttttaatcatttcagtcttaggggctgtcacgttgtagccgacaagaccaactgtcccgatcacgactgctaataagacgatgaaactgtatttccaataattgatggtccgtttagttgttgttttctgtgctgcttgatgtgcttgtctggttgtcataacctatcctttctctaatcccacgtttgcttgtgtgctttcatcacttgccaaaaggcctttgtgacccattgataacctttatgattgggatggaaatgatcatctggactgatataggggttcaaatgctcgttagccgctaatgttttttgcaactgtgcactatccattttagcgagcgatttagtctgtttgacaaaatgcccatcgccccgtgtcaacatccgatcactattgacataatacgtatctttgaaatcattagcaaccgttttggcggtctgattccactcagcaaccgcctttgacatcccagtgatttcagggaaatagacataaaacggattgtagactcccatgatgaaaattggggcatcaggattatattttctaatttgcatcatcagcgtggttaaattcgcttgatatttttgctgaccagtcgtaatccgacgttgattcagctcaaaaaaattattctgtaaaactgccattaggtcgttgcccccaacagttagcgtcacaatatcagcttttgccaattgctgctgtagcggcttttgtttctgcacgcgtttagtaatctgtacactggtatcgcccgtcacaccgaaattggcggtcttgacgggatgcttggttgcttgctgaatctgattggcaactaatgacacatagccttctttgttggtctcatcaccaacaccatgcgtcaatgaatcgccaatcgcaaccaactgcaacgtcttttttggttttggttttgatttgatcactttatccgctgaagacgttgatgttaccgtcttaggcgcttggttgggccgtggcgttaatagttgccagataataaagaccactaaaatcgcaccagcaaataagcctaaatcaattaaaatctgtcgtgctttcttcaaacgtgacacctcggttatttctagataatagttaaggctgggacaattaaatgtcaaccagccttagtgtgttaatgcattaattgtaatcttgttaatcctctgtgtagtacataacggcaaatgcgcctgcacccgcatgcgttgcaatcactggatcagttgtccggacaagaatttcgatgtttgggaatactacttgcaattgtgctttaattttttcgctcaattctagcccatccgcatgtgaaatcccgattgcccgaatctttaagtcgcgcatatcagcttccatttcatcgatgaatttcgtaatggtcttcatcccccggcctttgcgtaacacttttaattcgctatcagccacttcaaggatcaccttgatatttaataaacttgaaatcacaccagccgcatgactcaaccggccccccttaacgaggttggttagatcagtcacacccatgtataacttcgtatgatcgtgtacgttttgaatggctgctaaagcatcatccatgctaccgccgttttcaatgacttctgccgcttttaacacttggaatgccattgcacggtcggtaaagtcgctatcgacaactgttacatctgctttcgccatctcgccggcttggcgggctgtatcaacagtgccactaattgctcgtagcatgtgaattgataaaatctggctgccatcagccgctaattgttcatacgtttcgacaaaattcccgattgcgggttgactcgtcttaggtaaggcactcgcacttgccatttcagtcataaattgatcgcgggtaatggtttcaccatcgatatacaccgtattgtcaatcataatcgtcaacggaataaccgtaatatgatgttctttaatttcttcaggagtgagttggatggatgaatccgttacaattttaatattagccactattacttcagccacgctttctatcttgaaatctgggcaataaacggccccgtgatttctatgattatgtctattgacagtatatcaaacaatcgcgcttttttcaccaaaagttactgattaaaaaaaaagccagttgtcacttttgtagcaagcaaaaaggcggttacatcgctgcgaccgcccttaattgaatctttctaacggcgttgatagatttcaaacgtatgcgcatagcgattacgttcgtccaccacaccaggtgtttgactgatcaattcgaactgatccatcgctaattttggcatataaacgttgccttcaaacgattcagcaatttttgtaacgtacagataatcgacatcatcggcgtacattgcaaaaatatcggcaccaccaatgataaaaatctttttcatcgggttggcttgctcatatttaagcagttccgctttggtgtgcatcacaaacaccccatcagccacagctaaatccggttgtcgcgtaatcacaatgttttggcgtccaggtaagggttggacgggtaaactatcatacgttttccggcccattaccaccacttcatgaaccgtttcgtgtttaaaattggcaagatcgttgggtaatgaccatggtaagtgaccattttgaccgattaacccattttgatcttcagcccataagaatgctaacattggcgctcctcctcattaaaccgcaacgggtgctttaattgcgggttctgcttcatagttttcaagtttaatatcggcgacatcaaaatcaaagatgcttgttttatctggattgagccacaattttggtgcggcatgaattgggcgttcaagctgtgtcttcacctgttcaatatgattactgtaaatatgggcatcacccaacgtatggatgaattcaccgacttcaaggccggtttcatgcgcaatcaaatgtgtcaataatgcgtagctcgcaatgttaaatggtacgccaaggaaaacatccccgctgcgttgatacaattggcacgataaccgtccgtcattaacgtagaactggaacatcgtatgacaaggcggcaacgccatacttggcacgtcttctggattccaagctgagacaattaagcgccgtgaatcgggattggttttaatttgttcaatcacatttttaatctgatcgattgtgtccccagaacgggtttgccaagcacgccattgtttaccatagatatcgcccagttcaccatattgtttggcaaaggcttcatcgtctaaaatccgttcgttaaactgttgcatttggtcgcgataaacagtattgaaggccgcatcagtttgggcacgatgaccaaaatctgtcatatccgggcctgtgtaatcggcactttgaacgtaacgttcaaacgcccattcatcccaaatatgattattgtgttgtagtaagtaacgaatattggaatcaccttttaaaaaccacaataactcacttttaattaacccgaatggcacttttttggtggttaataaaggaaacccttcgtttaaatcaaagcgcatttgatagccaaacagactataggtgccagtgttagtacgatcttctttataatgacccgtttctaaaatggtacgtgctaaatctaagtaggtttgctcagacatgatgtggattcctttctttaacgtgcttttcaagctaactttctgcacttagcgacgtatgtcaaataatcgactttgtcgcttattcgtcaccctaagctaatgcttaaaagttgaacaagcttgaacgcacttcttttaacgtgctttttgaaactggcgcttgcgcttaacgacatttgtcaaatcagcgattacatcgctaattcgccaaattaagttaatgctcagcgtcaaaccgtttcaaacgcactcagttttttaacgtgcttttaaaaccatgttcttgcgtttagctacacaagtcaaacgattgctttcagcaatcattcgccttgttaggctagtgctcggaatatacccggtttgaacgcactcatttagtttgcgtattcacttaagtattcccagcgggtcattttttcgtctagttgttggttaagttgatccatttgggcctgccactctgctaatttaccatagtccgcgccgtttgcgttcatttctgctttgatggtttcaatctgttcgtccaattgttccatgtcggcttcgatgtgttcgtattccttttgttcggcgtatgttaatttctgcttggtctttgcaactggtgcttcttcaaccgatgctgtcgctgctttaggcgctgacttagttggtgttgctttttgttttgccaagtaatcgctgaacaggccaacttcggtgctaatcttgccggccccttcaaaaatcaagagtttgtcggcaacttgatcgaggaagtaacggtcatgcgaaactgtgatcacagtcccgttaaagttttccaagtaattttccagaatcgtcaacgtgccaatatctaaatcgttagttggttcatccagtaataagacgtttggttgttgcatcaaaattttcaacaagtacaagcggcgtttttcaccaccagaaagtttgccaatcaatgtgccgtgcatttgacggctgaataggaattgttctaacaattgtgtgacactgatccggtccccatttttaccaatgacttcttcgccggcttcttgcaagtatgcaatcactcgtttgttaggatctaagtcttcattttgttgcgtatagtagccgaggttgacggtttcgccgacaattaactcgccactatcaagtgggaggcgttcagccaacacgtttaacagtgatgatttaccggccccgttgacgccactaatcccaatccgatcattcgcttgaactagaatactaaagtcatccaaaatctgacgatcgccgagttttaaactggcgttctttaattcgagtacttttttacctaaccgcgattgccccatctgaatatcgacttccgaatcgtctggtccagtggttaaattcgcctttaagtcattgaagcgattaatccgcgcttgttgcttggttgttcgtgccttagcacccgcgcgcatccacgttaattcttgcttgtagagttgttgttgcttatgggcagcttgttgttcacgttccaagcgatcagctttttgggttaaaaattgttcatagttaccgttatatgaatagagttgaccaccgtcgagttcaaaaatttggttcgcaacacgatccaagaagtagcgatcatgcgtgacaattaaaagcgcgccttgatattgtgctaagcgtttttcaagccattcaatggaatcaaaatccaagtggttcgttggttcgtccaaaatcaataagtctgggctttcaattaaggcttgtgccaacccaacccgtttttgttggcccccagataatgtattaatcggttgatccaaatccgttagatgtaattgcgtcaaaatcgtcttgatatccgtatcaaccgtccaagcatcttgttgcgtcatttgcgcatcagcttgttcgtattgcgtctgtaacttcggattagtgggatcttgcgtatatgccgccaagacgcgttcatagttttgaatcgtcttgaaaaccggattatcgccggcaaaaatcgccgccataatacttaagttcgtatcaaagcttggtttctgggctaaataactcatcgcgtattggttaggcgtttcaacctgcccgctatcgtatgaatccgtgccggtaatcgcgttgagtaacgtcgttttcccggtcccattaatgccgactaaaccaatgcggtccccttcacggattaaaaatgaaatgtcttcaaaaagcgttttttcgccgtaagtcttcgttaaatgcgttgctgtcaatgtttgcaatatagtcacctttttactttcgttaccatcaatcatagcgaataatcagacgactgacaatcaaaatgacaaaaagaatgtcgtaaactgtaaacaaataaaaaagcccctgacaacgatcaatattgtcaggagctaacgtttaaatttcagggtacatatctgcaattgtgtgttctgcatcaatcacaatgtacaaccgaccatttttttgtgagatttggctactttgataaatattatctaagccactattatctttattcttgaatgggaaataaatttgcattggtgcgcgatcttgatcatcttcaaagattaaatcgagtttttcgatgtcttgatacttcgttgcacgaccgaacatccccatttcaagagaaccggtgttgatgtcttcggacttcacatgatccgcttcaggtaagatttcggctttgaaactcttgcaagggtgaatctcttgcattgggccaccattaatgcggccataactggtggtaacacggctaatccaaatatcatttaattctttgtggctgacggtccaagcgtcaccatttctaaaataaaatttcaattccttaaaaacatgttgtgtcatcaattgtcaccctttctgaatgtgcttacatggttattttaacacaccttctgagggaatggcttagttttgtgcagccgattgcaataattgggcttgatcgtttggtaattgatctaacaccacggctttttcgagttgcgccaacatttttcctagttgcggaccaggttgatacccattttgcattaagacttgtccattgatggcgagttccgccttttgcttgatttgcagtgccgcatactttgcttgccactgatcaactgcgactgattcgttggtcattaattgggcaacaattaacgtgatgtctaatacatgttgccccgcttgataaagggcccactgatcggctgattggtctagaatggctggcaataatcccaaacctgctttaaccgcatcgatcacatcgttagcactcttccagcgtttcaataatttgccggcggcggcgggggttttacccaataatgcattgactagtagccaagccgtatcttcatcatgaatctgttgcgctggtaatgccgctaatttggtcagtcccgctgcttcagtcgcgaacgctggacaatattgatacaacccggtttttaaaaaggtttgtaacccattttgccgctgaatcccttgtagcaacttcacaaattcgacatgaatgcgttccaccgcaattttcgttaatagttcagcatgtttggcaatcgcagtttgtgtttctggtgtaactgcaaagccgagttgactttcaaaacggacggcacgcatcatacggagtgcatcttcgtggaaacgttcgtcggctttgcccaccgctctgatttgttgcgcttttagatcggtcaggccatcgaataaatcaataatttcaccatcagcgcgcatcgcaagcgcattaatcgtgaaatcccgccgttgtaaatcttcgtctaacgaccgcacaaacgtcactgaatcaggccgtctaaaatcttgatagccactttccgttctaaaagtggtcacttcatagccagtcccatgatcaagaatcatcacagtcccgtgctggattccggtatcgaccgttcgtttaaaaatttgcttcacttctgctggatacgccgacgttgcgatatcaacgtcgtgaatcggcaagcctaataaataatcgcggacactgccgccgacgaaataggcttcaaaacccgccgcttcaatttgttttaagattggtagggccgcttcaaattccggcgcaaaggtggttactttcatggctatccctcttatctaacaattaactgtttctgatgctatttatcataccacaatcaaggaccccacttcagccaccaaagtggttccaactgtttttaacccccattccgtgctatatttgagttatgtaaagggggcgttgacatgacgaaacaacatacttggcaaacgactagtcgtgatttagcggtgattgcgctgggctgtgcgatctacgcgtttgggctagtgaccatcaacattcaaaatcacctggctgaaggtggcttaaccgggattaccttgattttacggtattggttgcatatcgacccggcgtattcaacggctttgttaaatatcccgctaattattctaggctatcgttacctcggtaaacgcgcactcgcctacacgatttacggaacggcgatgatgtccgtttttctatggatttggcaacgtgtccccatcacaattgatttaaaccacgatattttaatcgccgctattctagccggtttatgtggtggcttcggcagtgggattatctaccgcttcggtggcacaactggtggcaccgacgtcattgcccgcattatcgaaaaagaaaaagggatgccaatgggccgctccctccttctttttgacgtcatagtcttaacactctcactcagttacctcgatatcgaacatatgatgtataccttaattgcgtcttacgtcttctcccggattgtgaacttcacactcgagggtgcttacgccgccaaagggctactcgtaatcagtgaccacgcgcaagcaattgccgatgacattctggccgatatggaacgcggcgtgacgtttctacaggccacaggcgcttatgcccatcaagaccgaccaatgctgtactgtgtcgtcagtccaagtgaaatcgcctatcttaaacggttgattaaccaacatgacccgcacgcattcgtttccattattgatgtgcacgaagcactcggggaaggctttacgtacgactaatcaataaaaacgccagcgattaatcgctggcgtttttaagtgtctttatgataattcctgtccctcagttaactcaatttctttttcaacttcttcaaccgtcacaaaatatttttgattgcgcagaacaaagaaaatcccaattaaaatcattaagctcgcaaaataaaaagtccaatgcgctgaccatttctcagcgattttaccagcaacaaatggtgcgattgccccgccagtaaagcgaataaagctatacgccgatgatgcaacactgcgttcaatcgaatcattttccatcgcaaccgtcgttaacaacgtattcaccaagccttggaagaaaccagcaatgatgacgccaaaggccactaaggctggttgatctgcataaataccgatcaccattaagcagatcaagaaaaagcttaacccaaacaacaacgtcacaagggtattcgttttttgttccatccgtggtgcaatgaaaaccgatgcaatggctaacatcacgccccacccgaaaaagacaaaaccaacttgcaattcagttaacccaactaataagaatggtgcatacgctaaaatcgtgaaaaacccgaaattatacaataatgcaataatcccgattgaacgtaaacgatgattttttaacgcgacagcccctgcaaaaaaaagcgcccttttagcaggtttagcaatcggttctaatgaaaccatgatggtcaacgccgcaataaacatcaaaatggcgacaccataaaacggaaaacgccatgaaagactccctaagacgccacccacaagtggtccaacggccatcccaattcctaaagatccttcgtataacataatcgcttgttccgttttttcaggcatcacactgacaatcgcagtcaaagcggttgataggaacaaggcgttcccaaagccccaaccggcccgtagcgaaattaattgcgtaatggtctgtgaacgaccagctaacgccgcaaataaaacaataatgatcaaaccaatactaatcgtttttttcgcaccaattctagtggaaataaaccctgtaaatagcataataatccctgtgaccaacatataactcgtaaatagtaaggtcgtttgcgctggtgtggcatttaatttaaccgcaatcgtttttaaaatgggatcaactaaaccaatccccataaatgcaaccatacacgtaaatgcaacggcatacgccgagcgtagccctttattttgattctccagcaacatatcactctctttctctttatataaactacattagattgcaaaacatatcaatttttacattaaaatttgacataatatagtgacatgtttgttgactctaaatatggtatactgagcaataattaatcgattaaagggtgaaataatatgagtacgcttagctatattttattatgtatgttagttcgcaaaccgtgtagcggctacgaattaaagcagtacattaatttattttgggaagcacaccacagtcaaatctacacggcattaaataaactgcacgaacaaggctatgtcacggttaaaattgatcccgttcataaacaaaagaagatttatcatttaacagaagccggccaactcgtcgttactgactggtttcaagaagaaacgaatttacccacacaacgtgacgagtttttagcaaaagtttacgttatttcactgttcaatcaagaacaagcagctgacttactccaagatcgccgccatcattaccaaaaaattcaaaaacaataccaacataagatgcaagaatacaacctcataaccgatcccaccgaaaagcaaaaaaacttaggtcgttacctgattttgaaacggcgcttaatggtctgcgcaacagaattagaatggtgcgcgtgggcgcaggacattcttaaccgcaatcaaaaccaataaaaaagacagctaatgcacttaaaaatgcactagctgtcttttttatgctttagttaaacatttcccacaataaacacgagctaaattaactatcgttagcaggcaaagcatactaacggccattaaaaacggtccagcgagcaaagccgccattgagatgggtgcttggtacaaaatggttcgcccgacatgaatcgtcaggctccaaactaagcccccggctagtaggctgactgcaagacaaacaccaactaagatcactgcatgcgattgttgtgtcagcaatagttgctgttttgttaaaccgagcaactgtaattggcgcatttgctgggcattatcctcttttgcgactaacagcgtcgccaatacattcgctaatacaatcagtaacggcgcgcccaaatataaaccaattgtcaaaatgaaattcaccaaacgttcattgttggcactcgtggtatttgtataggccggtatattccacataattgccgacatccccgtaattaaaaccgcaatgaccgtcactggcgtatacaacggcaaatatttttcaacagtatagtcaatatcatgggctgccatgttcaaaaagagcgttctagcacctaaccaatagagcacgtggctaattaattttaataccgtgtgtccggtaagcgcaattagaattaataataagaacaacacgagattcaggttgccaaccgaattgccgagactgccaattgctttctcggaatgaccgacataggttaacgccatgctttgcatcgttagtttaataattaacccactgacgaccattaacgaaacaatcgtcctaactctacgaacgatccgccgtcggtgactgagatgcttattcccatcttttagttgatggcgtgcatgccaaaaaccaccactaccggcaattagactaaccaagacaaccgttaacaaaagtgccaagaacgaaaaatgaattggcatattcggcaacatttggggcccaacaatctgctgcaaccacgcataacaaaaacgcgttagtggcaaggcaacgactccgccgagcagagcactcaccccactgacaattccgatttaaatccccaaaatagcggccagtgcattgatcgttgcccctagaatcgcaagcattcgatagtccgttttaaactgatccaaaagctggtgcacgacttctttaatcacgactaccattgtaataccaccaaaaaataccggcatgataaaaatcagcaacggtgtattcggaccgtatagatcaacttgctgcgactgtgccacattcacaattcccgttaaacaaaaaccgaggattaaacccactgttacaaaaactggtattgttgctagccattgccgccaggaatgctttaactgtaaccaactgattgtccacatcgcttacaccacctgatccaaggcggcatagattgtcgcaagtgtcggttcagtcacaatttgctgaacctgaccgtcttttaatacaatcgcacgatctgtctgactagccagctcaatatcgtgggtcaccataatcactgttctccctttagcaaccatctctttgaaatatgtaaaaataatcgctttggatgccgaatctagcgcacccgttggctcatcggcaaatagcacatcacaatcagttagaatcgtgcgagcaatcgcgactttttgttgccaccacccgataaagtcgcaacaggcccatcgatttgtcccacaaagttcattttggtcagtaactgtttaatctcagcacgttgcggttgctgatgactcaagcgctgttgtaagacaacattttcaaagacgggtaaagactgaatcaagttgtattgttgaaaaataaagccaatcgtctgtctgcgaaaagccgctagttgattgggtttcaattgatacggattaatccctgcaattgccacagtgccgcctgtaggtcgcgtaatccctgaaatacaatacaacaacgtactcttaccagacccagaaggcccaacaatactgaccaactcccctttttgcaccgtaaacgaaatatttttcaataaggttgtcgtctggtcagactgcccaattgacaccacttgtgttagttgggcaaccgaaagtattgtgtttgtcatcctaaaaacctccccaaataaatcctgttcccgattcctcttcaatgtaccactttcatctggggaagaaacgcgactaaagacgcaaaaaaacgctcgactaaagtaatagtcgggcgtttttttgcattattgcatggcttggtaatcgtcatagagagtttgcatctctaaatcgtttggcacgagcttcaaatattgtttgagggccgctaacatttctgggacctgtgccatttcttggaagaataaaattaaatcgtgtagaaagtccgagttatctttcaagtcaggataagctaacagataattttcgcgcgcttggtcaacatcatccaccgccatctgtgattgcgccaatgaccaatataaatcagccgttggtttatgattttcaatcgcatcttgtaagaaagcaatgttttcggcatggcggccttgacggcgataaacttggctcaaggcactaatttcgcccatattatcaggatcaatcttgagggcctcgtttagcatctgttcagcaacctcgttattgcctaattgaagcgctagatcgctccccttttgatagaggacctcgttgtaggcatcgtacccaattccggtctgaacggtcgttaaggcgtcttctaattgattctgagcctcttgagctgctgccaagtaagtatatagtgacgtatattgtggatcagtcgtctgtaacttggttaagatttcaattgctttttgataatccttaatttgtaagtacaaaaagcccatctggaattgatcgtcttctgttagaaattctggcgtcaacccttcgtaaatctgcaaagcttcttcaaaagccccactgctggcataactagttgccaaccgcttttgaatattcacctgtcccagttcaacaacgtcttggtcgatgagcgtctcatagtaattggcggccttcacatattcacccatttcaaagtacaattcagctaatgcgaattgcatgacgggttcatctggatataggcgcaacgccgtcaataatttttgttcactaacttctggtaagcccattgtttgatagacatcagctgccgtcagcagactttcggcgtacgcattggattctggcgtaatatctgccaacaagttcaaggcgtcgtcgtattggccattgctgaccgcaatatctgctagtgttgttctgatttgatcttcttcaggaaattgggccaacaattgttggtaaattgtcgttgcttgttccaaaaaacccatcgcatataactcttcagctaagctgtagagcgtatcgggttcatcagcaactaaggcttgttggaagtaagtctgtgcttgttctaaattattatcttctaatgctgtaagcatttgttctgaattcgtcatttaaccaccctttttcgattgttccattttaacatattcggattaattgccaataaaaaaagactgggaaaaatcccagcctataaattgaattcttatttaacagaatcctttaatgctttacctggcttgaatgcaggtactttgcttgcaggaatcttaatttctgcaccagtttgtgggttacggcccttacgagctgcacgttcacgtacttcaaaagtaccaaagccgattagttgaactttgtcaccttttttcaaagtgtcttggattgaaccaaatactgcatcaactgcagcagttgcatccttcttagttaaaccagtctttgatgctacgccttcgatcaattgtgctttgtttgccatgtttttcacctcctgctcatcacagataatcagtaattaattaccgaaaccatttttgagtggtcaaaaatgacgaaacaatgatttgatcaccatttcattttttaatttatcacacaaacctagtgatagcaaggaatttcgctaaaaaacagcattctgagcaaattagttaatcatattagcggatttttgaaaaaacagcttattttcgttgacgagggatcaaatggattggtgtaccagtaaagtcaaaggttttccgtaattgattcttcaagaaacgttgatatgagaaatgaagcaagttaacatcgtttacgaagaccacaaatgtaggcggttgaaccgctacttgtgtcatgtaataaatgcgcaatcgtttcccattaatagctggagttggtgtcaccgttgttgcgtccatcaagacttcgtttaagagtgctgattggatgcgccggttttggttttcactcacttgttcaatcatcgctggcaagttttgcaagcgaacgccggtcttagccgatacaaagatgattggcgcatagtctaagtattggaattgatcgcgcacgtgattttcgaactctttcatcgtgtggttgtcttttttaagtgtatcccacttattaaccacgatgataatcccacgaccagcttcatgtgcgtagccagccactttcttatcttgttcacgaataccttcttcagcattcaaaacgactaatacgacgtctgaacggtcaatcgcacgtaatgcacgcattacggcgtatttttcagtattttcgtagaccttaccccgtttacggatcccggcagtatcaatcatggtaaattcttgattatcttcagccgtgaacttcgtatcgatggcatcccgcgtagtcccttcaatttgagagacaattacccggtcttcttttaacatcgcgttcacaagtgatgacttcccaacattgggacggccaatcaaactaaacttgatgctatcgtcttcttcttcgtcatcttcagctgggaacttagcaacggcggcatctaaaagatcacctaacccttgaccatgagcccctgaaacggcgatgggttcgccaaagccaagactatagaaatcaaaaatatcttggcgttgttctggattatccgccttattaaccccaagtaagatcggtttgtcagcgcggtataaaatttgtgcaactcgctcatccgcatcagtaaccccttctcgtgcactcactaagaagataatcacgtctgcttcatcaattgcaatttctgcttgttgtttaatctgttccataaatggtgcgtcactaatttcaatcccaccggtatcgattaggctaaattcatgccctaaccattcacttgtggtataaatgcgatcacgcgtaacccctggcgtatcttcaacaatcgagatccgctcaccggcaatgcgattaaaaatcgtcgatttaccgacattaggtcgaccaacaatggcgataactggttttgtcattgtattcattcccttcgttgttcagtgtaccctgtctgagccaaactgacaaggtcactccgacaaagtccgctgaacttccgcttcctctgcgtcgtactaatcaatcaccgacataaacgtagggtctgggacaaaacctagttttgtcccagaccctacctttttgcatataacttttaaaaaaattatttatcgtctaatgttttaccaagcatgtcgccgatactgaaacctgtttcttcttctggcatcacatagtcagaaggcgccacatctttgtgttctgaatccttagcaccagcaggtttttcttgcaatgctttgattgataaacctaaacgttgttgttcaggatcaactgataagaccttgacttgaaccgtttggccttcttctagcacatcgtttggtgtggcgatatgttgatgtgagatttgtgaaatatgcactaaaccttcaaccccagggaagacttcaacaaaggcgccaaatgttgttaaacgtttaacgaccccttctaaagtgctaccaactggtgctttatcagcgatatcatcccaaggaccaggttgcgtatctttaattgataatgagatccggcctttttcttggtctaagctcaagactttcacttgcactttttgaccaacttctaagacatcagaaggttggttaatgtgatcatatgaaatttcagaaacgtggactaagccgtcaacgccacctaaatcgatgaatgcgccaaagtttgtcaaacgagcaacttcaccttcaacaacatccccaggtaacattttttcaaaaactgcttgtaacttagcttgacgttcttgttccaataatgctttacgtgaaagaattaaacggttttcacttggttcaatttcaataatttgtaaggttaattcttggcctttaaagctgcttaaatcacgtacgaaacgatcagaaatcattgaagctggtacgaagccacggacaccagcatcgacgactaagccgcctttaaccacgtcgatgactttagctgtgattgtttcttgattagcaaatttttgttcaatttcagaccaaactttacgggcttctaagcgacgtttagataataagtagctcccgttttctttatcgttaccgattcttgaaatgaccactaaatctaattggtcgcctactttggcaacgtctgcgatgtcttcaataggttgacttgataattctttttgaggcacaaccccttcaacaccagttccttcgatgccgacaatcacttgtcgatcttcaattgctaaaacttcacctttaacaacgtccccaattttgacttcgtggacactgtctaaagcagctgccattgcatcgctgctttgggtgttattcaaattagcttcactcatagctaaaatcctccttaacgactatctatacagttactattttagttgatatctattcggattaccagttattttacctcgttcaaagataaaattacatatttttctttacaattgctaatattgtgtcgaccacctcatcgattgttaactgagttgtatcgatttcaatggcgtcgtcagctttttttaagggtgaaatggcccgtgtactatctttttgatcacgtaattcaatctctgcttgtagcgttgctaaaggcgtcataatccccttagctgtattttcagcataacggcgtttagctcgttcttgggcacttgccaccataaaaattttaaccttcgcagcaggtaacaccgttgttccaatatcgcgtccatccatgacgacttgaccttgatctgcaatctgacgttgccgtgcaaccatctcagtgcgcacaccagctaaagctgatacttgtgagacattattcgtaatttcaggggttcgaatggctaatgtaatatcttcaccattcaagaagactttttgccctgcttggtcaggtttaaattggatatctgcttcttttaaagctgctaaaattcccgcttcatccccgaagtctaaccctaatttctgtgctaacacggttgatgcgcgatacatagcacccgtatcaacgtatacgaaccctaatttagtagccacaattttggcgaccgtacttttaccagatgatgctggtccatcaattgcaatttgcatgttctgcctcctgaaaaaatcattaaaaaaggctgggagtttccccaggccttttggtagtactgattatttaacttttagagctgtgcctggtgccacttgtgaattggctgttaacccagggtttaatgcaagtagttgatcgagtgttaaaccgttattaaccgctgcgcggtataaaccttcgccggctttcaacgtataagaaccacccgttgtttcgcttgaactgctactttcagttgttgtttcttcgctactactattttgagcgtctgcttgagcttggctttgactattagccttttcagcttcttctgcagcttgtttgctactttcagctgcttggctttcactagccgctttttcactttcagcctgtttagctttactttcgctggccgctttggtagcactttcgctagcagacttcgcttttttagcttctttcttagaagcactatcactatcagaagtattaacgacaatcttactagactcgactgggcggttagcccggctagaatgaatcgtataggcaataatcggaaatgcaatcattaaaacaagcaatacacctagaataatggcaaaatatgtatttcctttttccttactcttggaagcaacacgcgataaattcccgcgatcatcacgatcatcatcaaactggctttcccagggtttgtcttccgtctgattatctaattttttcttatcatctttgagcattgacggccctccctattggtattctttgatattgtaccatagacccttttaaaatacccagaaaatctctaaaacaattgcttcaaaataccgtcccaatggtctaacccgtctattttaggggatttatcatcagttaacgtttttaaattaaatttttctaaaaagaccgttgaatcctgttgaccacaacattgatcagcatgggcaacctgttggggttgctcgtcaaaatagttcacaataaattgccgccgacagccttgtaagtttaaataatcaaccattgtttgaagcgcaaaacgcttttctttttgccgattctgtaacagttcactaacggcctgttcatccatcccaatttgctgataccgccgtaataattcaaactcgttgccttggctttgtttaaataatgtcggttcttgatagaaacgccgaatcaatccagcttcaggaatcccaaatgacactaacgactgttgcagatacgtatcttgcggtgttgctaacaacattgcataggctggttggccatcgcgccctgcacgaccgacttcttgtagataactttcgatattttgcggtaaatgatagtgaatcacatagcgaatattggctttattaatccccattccaaatgcattcgttgcgcagattacgtccaactgcccttgcataaactgttgttgaataatgaagcgctcctgtggcgaaagcgctgcgtgataataggcaactcgcatcgctgtcttttgttgcaaaaaagccgcaatctcgacggtcttttgacgacttgaaaaataaataatcccgggcccctgactctcagttactaattgttgcaaaaaggcgttcttactcgcttcatccgcttgttgactcacccctaagtaaatattaggacgatcaaccgacgtaataatcctattggccgactgcaaatctagcttggctaaaatatcatgccgaacctgtgcatcagctgttgcagttagtgcgagcgttgcccccggatttaattggtgcttgatttgcgcaagcactaaataatccggccgaaaatcaatcccccattgtgaaatacagtgggcttcatcgatgaccaataaatcaatctggcattgttgtagtgcttgaatgaccgccggctggcttatcgtttcaggcgccataaacacgaaacgatactgtggcaattgtcgcaataacgcatgcttttgccgcggttccaaatttgaattaatcgcgactgcctttttttcaccttggtaattcaactgtgcgacctgatcttgcatcaatgcaattaaaggtgaaataatgacagtggtatggcccaaaagataggctggtaattgataacataatgattttcccgtcccggtcggcaaaaccgccaaagtcgcttggcccgtcaaaacagattgaatcacttctaattgtcctggcttaaatgtctcatagccaaaccgctcttttagcgttttataaatcagttcatccgtgctcattgggcgttcacctgcctttgaatttgataaagccgatactcaaagaaatctagaccggggagtgcggtttgtgcttcattatagctgagcgatggctgttcagtcatcaatctagctagtttttgtgtagttgcatcctttaagaattgttcaaacggaaaccgtgggagtaacatcgcggtttctaaaaggtgttctttaatcgttccgatcttaacccggcgctggcggctgatttgtttaacactcgccccttgttggatcaattgccaggtctgtaacgtactctgactcaattgcgtttcagcctgatccactaattcattcaatagcggataagtcgtttggtgcgccaataaaagccctaaaatttgagcaaaggcgtcgatggtccgcacacgaactgtcaaggatgggctatctaaggcttgcgccagttgttggtggcttttgcccaagacttgatgtccgatcagttgatttgccacaagatcggcttgttgcggatctaactggtcaagtaattgcgccaattctagctggaattgactgctaaaattgatggttgccttatgccgcttaaaccaactgaccaccaacacgcggtccttcatactcgtttccaatggatagtactgcgtattttgatgatgatattccgacacaatttgaacggccaacataaaacgagcagtgaattggggtaagtgacccatctgtgggccttcatagtgcgtcggccaaactaattgcggctgccattcagcttgtttttgttgcccggtagcagtcaaccaaacataccgctcatcgatttcaatccaaccattttgctgaagtcgttttaattctgcttgaaattgtgcctgttctagattaggataaatttggagccattttaataatccatatgctaaaccggcatacagatttgaagtagttcgtttaccaattaaggtatagtagattgcttgataccgccttttctcaggcgccaacaagcataatagatacgccattaacatcatcaattaagtcctttattgagaaagtgtgaatttaatgctctatagtcaagtcatcccggaacgctgtatcgcctgcggtctctgccagctaaaggcgcccgacttattcgattacgatcaagaagggatcgccttttttaaacccgatcataatcagggaacgacgccaattgaagatcctaaagaacgaattgcgtttaaaaccgcctacaccgcctgtccaactggtgcgattgtacgccaatcaacgccattttcatcgtagcatatttacgtcctataaaaaaggttgtgcccgcttggacacaaccttttttgctgccatttatttggcaattggtttttgcatatgttgttttagccatggtaaaatccgtaaatataaaacggcaaacaccaccgttacgagtgcacctttaattaaattaaacggtactaatccaaatagaatgtatttggtagtcgacattcctaagttcaaacccatcaatttaatatagagcggtaaaatgaaaagccagttagcaaatgacatgaagatcgtcatgctgacagcccccgcaacaccagcaattgcttgacctactaaaacgttcgattgacgcttgaataaataatagaatggtaacaagtagcagattgacgccaagacaccggcaaagtcgccgaccaaactcggtaagctagcaccggtcataatgaaatgaagcgtcgagcgaatcaatgcgacccccattcctccaattggtccgtaaacgaacgtccctaacaggacaatcacgtcactaaaatcaatttttaaaaacggaaatgcgagaataattggaaattcgaaaaacatgacgacaaatgaaattgcccctagcattgcgaccccaatcatcgtacgaacttttgaaacttgcattactaacaccctccagatgaggttgccttcgtcagcggacttagccaagtctgattgcatcaaaaaggtctgttaatcagggagattaacagaccttacttgcatacattcatacccaaataagccctatcttcttccatctagactttcactatcggtactggaatcacaccagttcagccaccacaagaatcaacattgtagcaggtcgcggacttttaccgccggtcgggaattacaccctgcccctgaagacgaaccattaatattttgttcgaaataagcatagcaaatcaacgtgccaaaagcaactaattaatcatgccgtgataattttggtcgattcttatgctgtggtttttcatttagttcagcaatttttttgaattctgcgacttcgattggtttcaaagcacggtattcgccagaaactaacccatctaacgttaagaaaccatatgtttcccgtttcaactttgttacgggtaggccaaccgcagctagcatgttcttaacctgatgattcatcccttcgtgaatggtgatgcttacaatggcagtgttcttacgccgatcagttgaaattactttgaccttggctggtgctgttttgcgtttttctaagacaattcctttacgcaattggcgcaacatatctgcagttggtaatcctgaaaccttcgcaatataagtcttgtcgactttatattttggatgcatcatcatgttggcaaaatcaccatcattcgttagtagtaataagccagatgtatcgtaatctaatcggccgattggataaacccgttcaacgatatcgccaaggtattcagtgacgacccggcgtttcttatcatctgtcactgctgaaatcacttggcgtggtttatacaagacataatagaccttgcgttcacgcgttaacggcacaccgtcaacttcaatatgatcgcttgtgctatccaccttgatacccatttccttcaccactttaccatttaaggtgacgtgaccagttgcaattaaggtttctgctttccgtcttgaagctaccccagcatttgcaatcactttttgtaatcgttccatttattgttctcctttggacgtctcttccgacgtcgtatctgtttcatttaacgtttgttcaaattgacggtaatacaagtctgctgtaccaccttcactaccatcgacatcagcgtcaagtgccaattgttcaagtggtggtaattcatcgagcgattcaagaccaaagtaatctaagaaataggtgctcgttccatataaaattggccgaccaggcgcatccttacgccctttttcgctaattaattggcgggctaacaaggtttggatggccccactactttgaacacctcggacctcatcgacttcaatccgcgtgattggttggcgatagacaataattgccaatacctcaagagcggcctgactaatactagttgacaccggtccatcaaaataggtcttcaacaacgtcgcgtattcttttttggtgactaatttatagatatcttcggcttgaatcaggttcaaacccgattcagtgttgccgcggtaacgatttgccaatttttctaataactggcggactgccggttcatcgagatgaataagttgcgcaatttgcgcaagcgcaattccttcgtcccccgcgacatataataaactctcaatttcagcgagatgattcaactgaaatgccctccttcaaccgaaccatgattggtgcatcatagtcggcttgttcgcaaataatttttcgatccttcatcaattctagtacggctaaaaatgttgtgacgatttcatctcgatctgttttaacaacgaccaacgcttcaaaagcaactggttgagcggctaaatgacgcacaatccaactcattttatccgtaatcgaaatttcgtcattttggaccgttttgaagaccggttgtttagcttgggcttcgaccaacattttagaaactgcggccgctaaatcgcgtggcttaatcacgccgcgcgccagtgggaccactttttcagctggattactactagctggcttagcaaagagctgttggcgctccaattcgcgctcttgcaaaaccgttgcgaccttttggaaggcttggtacgccaatagttggtccactaattcctgccgtggatcgacgtattcttctgtttcttcttcaattaattcaggtgccttaggtaagagcaacttactcttaatcttcatcaacgtcgccgccattactaaataatcacctgcaacatctagtttcaatacttgcatttggtgcaagtaatcaagatattgcgcggtgatttcagcaatgggaatatcataaatatcaatcttagtttgcttaattaaatgtaataataaatcgagtggtccttcaaaatcagtcaagaccaacgttaattgttcagtcattggtcaatctagtccatttctgtattctgatgttgttcccatttagcaatcaatggcgcagtctctaacgaacccatcacgcgactttcaggataaagcgccgctaattcatccaacatggtgaaatagttctcgtcgctacgttccgaagggttcagtgaaatatggcgcactaaaatatagtccgcacccagttcaatccccacaacaccggcaaaatcgccggcttcattgcgccataaatataaattgcgttgctcatccgacgtatagagcgccaattcagcttgtacatgactgacttcttttaaatccggtacgaaggataaaaagcccatcgcaatcttttcataatcatttttatacttgaataacatgttgacctccattgatcaaacaaagttctaatagcattaactctaccatagtttataaagcgcgacaaatctaatttaatcgcgtggatgactccgttggtaaacttctgtcaaatgtttcttactaatatgcgtgtaaatttgagtcgttgaaatatctgaatgccccaataattcttgtacaattcgcagatctgcgccattttcaagtagcacagtggcaaacgaatgccgcaatgtatgtggggtcacgtctttttcaatcccagccgttttaacatgtgccttcaggttcttccaaatcccttggcgcgtcaacccgttaccatggaaattaacaaacaggtacgggttagcacgccccttcgttaattgattccggctacgatcgaggtattgattaatccaatcaaccgctacatcaccaatcggtataatccgttccttattccctttgccgagggtctgaattaagcccagtgataaatgcaaatcagccatctttagatgaatcagctcgctaactcgtaaccccgtcgcatataaaacctctagaatcgctcgatctcgtaatccaagtgcggtgctcgtatctggtgccgccaatagtcgctcaatctccgccgtcgataaaacagccggtagatgacggccttgtttgggcgaatcgatttggagcatcggattttgtttaatctgcttttcacgcgctaaatactgatagaatttacgtaacgttgaaatgctccgtgtaatactactttgtgccttatgcgcatcagtttgttcttgcaagtagttcaaaattaaaaagcggtcttcagtaaaattggcaacctgctgacgttgtaaaaacgccgcaaactgttgtaaatcctgccgataactctggcgcgtattctccgaaagaccgcgttcaacttttaaataatgtaaataatcttgaattaaatcatccatgtgcttcctcttttacaactgcgtcacgtcaatttggcgactaggatccagttgattggctggtaacccattttgttggttaatctgttggcaacgtgcacaaatcccgtgaaatgttaaacgatgatctaacaccgtaaatgtgtaatcatcatatacctgttgttccacggcaggcaataaatccgtatgaatttcttcgattgccccacattgcagacacaacaggtgatggtggaaatgatggtcgtgatcagtctcacacaagtcatagtgggtcatcccatcttcaatgaaccgaactttattcaacacatgcagttccgtcaacatctcaagggtgcgatacacagtggccaacccaatttcagggaccacctctttagttgccataaaaatctgttcggcactcagatgcgcttgggcatggtccaaaatgaccgccaccgtcgcagagcgttgtgctgttaacttgtagccggccgcttgtagctgctcggatattcggtctaattgctcagctttatccatttagcaacttccttttcaatcattcaaaaaagcttagtcttgcttctcgtcatctgtaattggggcaatatcagcttgacctttttcagttaaactcgttaggccctctgcttgagtaattaagccatttttcattaaccggcctaatgcccgcttaaaactgcctttactaatcccaaagtaactcttaatcgcttctggatcgctccggtcagtgtatggcattgcgtaatcaggttgccgttttaagacagccataatcatttcagcatcgtcgccaatttcttcatatgcccgtggtttcaaactgacatttaaactaccttcaggtcgcacaccaatgacgcgccccttaacctgttgacccaaacgtggttctgcttcacgttcagaaggatgaatgaacccaatgtaaaagtcatccgttaaaataaacgtcccggctaacttcaaacggtagaccgtccccatcacgtcttggttcttcatttctggtttagcaccttttgaaattgatctgaagatgctttcgtcagctagttggccccacatccgccctttttgatcgacttcaatcgcaatcattaaacgatcacctggtttaggccataatttcgtaatggttggtaaaatatccagtgatacgacaatatccttatctggcaagccaatattgacgaaaacgcctaaatcacgccgcgtttcaaccacttcaccaaaggcataatggcccacgcgtgatttaggaataaacgttgataagatcaattcccgacttgagttttcataagcaaaaccagtcaccgtttcaccgattgtcaattcttgttctaaagtttctttttttaattcaaatgtcacgccgtctttttggacaaagaaggctgtttcattttcatctgttactaaggcagtaatgacttgcccgattaattcattcatagttaacctcttttattcttattaattaatgaattggtactaaattaaagaccgttaaaatggtataagtaatccccgctgcaattacggggccagccgcaatcccttttagaaaaacgacacccatgatggtcccaaaaaccaaggccactgtcatctcaggactagcggacaatagccccacacccttcgctgatagtacagcaactaacacgccacaaccaactgcaataaaacccgccggcgttttaaaggcattgattaagtctttgacaccaatttgccccgttgcaatcgggactaggatagcaaccgaaatcactgtcactccccaattaatgcctttggcttggatcacaggcagcaccttatttgaaatcgggaatacctttaatattaaaacaaccgcggtcgcaatgattaaagattgatttttcgctaacaatgcaacgattaaaatcgctactaaaaataaccaactttccatgtaaacctccaataaagtctccctactattgtaccgataaatgaacgacttgtcagtattttcagaaaagtaattcaagattcgcatttttaaaacaaaaaagccccctcttttcagagggggcttcatttcatcattcaggaatgattaaagagcgtttgttgcaccgcggtaaacaatcccacgacgtgaatcaacagtcacaacttcgccatctttgatagcttctgttgcgtctttagcaccaacaacaactggaatacccatagcgataccaacaacagcagcgtgtgatgttaaaccaccgttttcaacaacgatagcacttgatttttcgattgctggtaagtaatctttgtcagttgatttaacaactaagataccaccatcaattgctttttcagcagcttctttagcgtttgaagcgacaacagccttgccaacgattgtttcatcgccaacaccttggccttgtgttaattttgaaccaattaattggatcttcataacgtttgttgtgccacgttcgccaacaggaacaccagcagtgatcaagattaggtcgccttctttagcaaaaccatgttcttgagctgtttgtgtagctaagttgaacatatcatctgtattagcaggtttcttagcgataactgggtatacaccatagttaactgttaaaccacgacgtgtacgttcgtcgaatgtaacggctaagatgtcagcttgtggacggtatttagaaatcatacgtgctgttgagcctgattctgtagcagcaacgattgtcttgattcctaagttacgtgcagtgtgagcaacagcttggccaattgattctgtcaagttagtcttgctgtatgctttcaatgcgtatgcatcgcggtctgttaatgatttttctgttctttcatcaatgcgagccattgttgcaacagattctactgggtagtcaccgttagcactttcacctgaaagcattgttgcgtcagtaccatcaataacagcgttagcaacgtcgttaacttcagcacgtgtaggacgtgggttttcttgcattgagtccaacatttgtgtagctgtgataactggtttgccaatagcgttacatttcttgatcaagttcttttgtacaaaaggaacattttcaaatggaatttcaacacccatgtcaccacgagcaatcattaaaccatctgaaactttcatgatatcgtcaatgttgtcgataccttcttgtgattcaatcttagggaagatttgaacatgttccatgtgtttttcttctaataattcacggatatctaaaacatcttgaggtttacgaacaaaacttgcagcgataaagttgatttcatgatctaaaccaaaacgaatgtcgctagcatctttttctgtgataccaggtaagttgattgaaacaccaggtgcgttaacacctttacgtgagccgaccataccgtcgttttgaacttcagtaacaagttctttgtttgcttcgtctttttcaataattttaagatccactaaaccatcatcgattaaaacgtgtccgccgacatgtgtgtcgtcgtatagacctgggtaagtaacagcgattttttcaggtgttccttcaagtgtatcgtccattgaaatacgtaccacttcaccagtgtgtaattcaaatttcttaccttgttgaacagttgtccggatttcagcaccctttgtatctaacatgataccaactgttttaccagttaatttttcagcttcgtgaaccatgttcatccggcttaaatgttcttcatgatcaccatgagagaagttaaagcggaatacattagcacctgcttcgattaattttgtgatagtttcaacattgttacttgcgggtccaagtgtacttacgattttggttttcttcataagtggaatctctccttttatgtctattttttaaaagacttttcagtcgttttaacaattttatatatggaacgatgaatctagtaagctaaatcttcgtttaaatcataaagatctaacattgcgtgatgcttgtgattgaacaagtctaacatatcatgtgcgataatttcgttcttttcaatcccaagtgcaacgccacctttgccttcaagcaataattcaactgcttttgagcccaaacgacttgctaacacacggtcactagctgttggtgccccaccacgaacaacgtgtcctaaaacagttgaacgtaagtggaaatcgccgtattcagaaagtttttctgagaattcatcagcgtgcatcacaccttcagccaatacaatgacagcgtgtttttgaccatgttcacgtgaagtacgtagcttatcagcaacggccttaacgtcgaaatcatgttcagggataataatgtcttgtgcgccaccggcaacaccagcccaaagcgcgatatcaccagcgccacgacccattacttccacaacgaaagttctttcgtgactagcagctgtatcacggatccggtcaattgattcgagcactgtgttcacagctgtatcgaaaccaattgtttgatctgtaaatggaatatcattatcaattgttcctggaagaccaattgcgttataaccatgttcagttaaacgaagtgcaccgtgataagaaccatcaccaccgatgacaactaaagcttcgataccaaacttcttgagttgttcaatacctttcaattgtccttcgacttgtgcaaattctggataacgtgctgagtacaagaatgtcccaccacgttgaatcttgtcaccaaccgtaattgggtccatcttgaagatatctccggcaactaaaccagcgtaaccataattgataccatagacttcaaggccttcatgcattgcttttcttgcaacggcacggatggcagcgttcataccaggtgcatccccaccacttgtcaaaatacctatgcgtttcatcttttcaccccaggcaaatattttacttaaaaaaccaattggtctttcaaagtcactaatatattatcacttttcagaaaataagtcttgtcttttgcgaagattttcgcaaagatagaccaatttctttattggtcaaacccttttaaaatcacatttcccgtccctaaaaggtttgtaagcgcggtcgttagtttttcgttgctcacaacccaatagcgctcgttcaatagaattgactgtttatcggccgcattgtacaagataactggcgttgttccgtgattttgttgtaacaattgatacatttgttgttgcgcttgactcgtcaacgccgtttgaacccgtaaataaagggtcgctttgggtagcgtcttttgtgcatcttgtgccaattgaatctgattagcaaccacttgtaaatcgcgacgttgttcaactttcccggtgataaaaacaacttgtcctgtttgtagccattcactgacccgttgataaacgccagtaaagagcgtcacactaatttcaccggttgcatcttgccccgttacaaacgccatttgatcgccttttttcgttcgaatcaccttaattcggcgaatgaatagcaccaaatggaccgtttgctcgggtgccaaatcactgatatcaggcacatggtagtgttggcgtacacaatcatatttttcgaccggatgtcccgaaacataggccccaagatattcggcttctttatccaatcgttcagtcaaggttaaattcggtacggcacgttctttcggtgctaaaacagcaaataaatcgacgttattccctgacaacttcacactatcaagcaggtcggctaagttggtcaacagcgcattccgattcggattaaactgatcgaaggcgccactataaatcaaggcttctaatgcctcttgcttgagaaacttaggatccatacgctgtaagaaggccagtaaagatttaaacggtccgttcgttgtccgttcttgaataatcgccgccacaaaatcgcgccgaacttttttaatgctgaacaaaccaaagataatccctgagtcggctaatctgaaataactttgactgcggttaatatcaggtggcagcactttaatttgacgtttcttggcttctgctaagtaagttttcgtttttgtcggattgttcaaaacggcatttaataaagctgcaaaaaaggctgctggctgatgaacttttaaataagccaaccagaaagcaattttactataagcaacagcatgtgaccggttaaatccataattggcaaaccgctcaatatagtcgtagactgtcgtagcagcagtttctgtgtgcccgcgttcgagtgcgccttgaataaattgcgtccggctagcatcaatcaccgccttcttctttttactcattgctcgccgcaataagtcggcttcgcctaagctaaagccccccatcttggacgcagcctgcataacttgttcttgatacactaagatcccatacgttggctctaaaatatcggctaacgacgcgtccggataagtgacaggttcttgcccgttcttacgagcgataaatacgtcgatgttttccatcggacctggtcgatacaacgcatttgtcgccacgacgtcttcaaaagaactcggtgccaaccgccgtaaaacattcttaatgccaagtgattcaaattggaaaataccattagtatcaccttgttggaataatgcaagtgttttaggatcatccaacggaattgagtgtgggtcaaacggctgtcccgtttgctgtccaacaagctttacaatattagcaagaatccctaaattacgtaatcctaaaaagtcaatcttcagtaggcccagttcttccacgttgcccattggcaattgtgtaagttcaatctcttcaccgccactttgtaatgcaaccgtatcagttaacggtgcttggcttaacacaatcccagccgcatgcgttgagtagtgtcgtggcagtccttcaagtttctgtgctgtctcgaatagtaatcgattttgagtggaatcggccaccaaatttttcaatggttgtgattgttgataagcttcttttaacgtgattttcagcatgtccggaattaccttagcccaatcattcatttcaaactgacttaagccaaacacacgccccacatcacgtaacgccattttagctgccagtgtgccaaatgtaataatttgcgccatatgattccgaccgtatttgtgatagacataggccagcacttcatcccgacgattatctgggatatccaaatcaatatctggcatattcgcccgattggggttcaaaaaacgttcaaacaacaattgatattgaatcggatcgacatcagtaatcattaaagcataggccaccaacgaccctgccgcagagcctcgccctgggcccgtcataatatgttgttcatgggcatgccgcatgacatcggcaacgattaagaaataatcggcaaagcccatctcgttgatcactcgcaattcatactgcaagcgttcttgatattcttgcggaatcgcttgatcggcaaaccgaacttgtaagccttgctgacttaactgttctagatatgccgttgccgactcttgatgcggtgtttcaaagcgtggtaattgggcccgcttaaaggtcaactcaacttgacagagttgggcaatcttatccgtattgtgcacggcatcgaccaactgcaatgcttcaaactcggccgtaatctgatcagcagcttgtaaataatagccgcctggcgttgtctgatcaccactatggagattaacttgcgtaccagctttaatatgttgtaagacttgcactgaaaaagcatcatctggttctagataacgaacatcacctaatgcaaccagcggaactccggtcgtctgactcaatgcaattaacccgctaagttggggggctgctgctcgcttggcactgattcctaagtacaagctccccggatcaactgccgcctggagttgcgtcaaatatgccgttgtttgctcctccgcttgcaaaagtaggcggactaattcgccatcttgagccggcgtgatcactactaaatggctgaaccactgtgtaatatcagcaaatgaaaccagatcagtttgagtcatcactttagaagaaagcttcaaaagattctgatagccaactaaatctttcgccaatacaattagcggaaaccgttcatcggtttgaagtaatccgccaatttcaagcgttaaacccaagattggatgtaagtcagctgccttggccgccttataaaaatcgactagcccataaatcacgttcttatccgtcagcgcaatactctgatagccgcgcgccttagcactttcaatcagtgcatcaattttagtggtactttccaagagcgtataggtactcttaacctgtagttgaacgaatggcaagcaacgccccttctttcttcgttaattcgattactcttagtataacaaattatttcaaatgattctctttggaaaacgtgttacaatatcatagaattgaatcaaagaaagaaggccaactatgaaatacgttatgaatctactttggacattgatttttgggtttgtcattggatttatcggttctaaactaacgaaaaccggctttaacattcaaacaactgttatcgtctcagttatttttgggcttttgctcaacttcttacctcttgtcttaccaaaagatccagctaaataaagcacaaaaaagggccgcaactttatgttgcggccctttttacgtttattttgtaatgtaaatatacaaatcacttgttgaaaaaccggtattgaacttcacaccatttgattcaatcgtcttcatcgtggtttgactaccttttttgtttttcttcgtataatcgctaaattcggacatcacttttttggaatcagcgcccgttgcttgcgcaatcaatgcaaaactggtcccaaaatctttcaatgccgctttatctttgagcgctttaacgggtgtaatgagcgtcatccccattacatcttgactatcaacagaaccgcgaatggtgacatgctttgttgcgacccattcagtcaccccatttttaggtgtggttggtagcaattgatccttttgtgtctgttgcacctgttgcattgctgcttgtacttcctgttgccgctgcttaagtgtcatcagatcagcaggtgcaagttggcctgctttggcagctgctgcttgtttttgcaattcctgcgctttggtttgatctgccttagataacgccatcccaattaaagcctggttgtattgcgcggcaatcttggcatattggccaactgatgtgcccgctgcaatcgttaccttcttttgaacggttttaccgtttgctttagcttgtaccgttactgtttgtttgttagtcgttgttggtacttgaatcacataagttccgtctttgaccgttgctttttggaaatgattatgattaatccggtattgtaaatcagcttttttggttgttgaaccttttacgactgccaccattccattttggcgataatttgttttagtcgttgttaatttggttgtcccacaaccagccaatagaccgattagccctaagctggtcactaaaccaacaattgtttttttcatattcgtcaccttttcattgaaatttaactcattgaaatcttagattaacccttttagaatcacaattcaagcgaaaacgacgaagtgtcacattttttaagaccaatcaaaaagagcgaccacttaacggccgctcttttaaaaacttattttaaatttgttttcttttcataacggttaaacatatataatgcaacaattgtgaagaagatagggccagcaactgaccagattgtttgacttaaattaccatcaattgctggttgaataatcgtaaagacgttcgcaaaaccaactgtgaacatgaccatgcagacacagaatttatagaaggtcttccctttataaattgtaaatggtttttcgatactttcatcctttttaaagccaaagtatgagtatgccacaaacatgtatggcaatgtcattgaaacgtttgtcatcgctgttaagatatcgaagaacttagcagcactcttaccaccaaaagcaacgaaggcaataatcacaattacaattgcagcttggaccttcattgcattgaccggcatattattactatttttcttagtaaatgacttaggccaaaaggcagcaggtgtcccttcgataattgtttttaatggtgagaaaataattgtaaagaaagccccactaagtgctaagaacattgaaagccccatgtaacgactgagccaaatcccaacttgaatagcagcatgttcacttaagtgcattgctaaccctaattggtaacccatgttgttcatggcaatataagcaacgttccccaaagtaacggttgcgtttgaaccggttgctttggcgaagccaccaccattggtaaagacgaagttccagttagtgaaagtccccatcataaagatcccaacagcatagccgacaacaatcacgacagcagaaatagctaacccttttggaaagttaaccttagcgttttcagtttcatctactaatccaccaacaacttcaagaccaccataagcgaagatcgcaaatacaacgaaactgaagacttgaatcatcgatgtatagctttgatttggtgattggaagaatgcatgggttgtaacaggttgtgccattacccctttatttaaaacaaggattaacaaaccacccaagaataaaatcacgttgattaacgtaatggctgaaccaccaatactggtgattctcttgattttatcaaggccttttgatgtgacaaaggtaatgacaatgatccaaataatagctaaaattcctaatgtttgcacaccatttgtcaaaccaaagattgaccattcttgtgttttatcaaccccgaaaaaggcgtttgataatggaatccaaatcccgttcccgacgttaaccatccagataatgtatgaagcaaaccacataaatgtgccgacaaaggcaaatttagcgttaacggatttctccatccaagagtaaatccccccctttgcttcaccaaaggccgctcccatttctccgagcataaatgcataaggaataaagaaggtaacagctgctaaaacataccaaaaaattgatgcatatcccatcaagtagaacgcacgtgggatattcgtaaatccaaagactgacgtaaagaccattagaataagcgcaccaagcgttaacttattcgtcttcttcttttctgccacctaaaacacctctttcatttttttcagacttaaccacaatgattaatcctctgaataaaaattagttaactaacatttgttaataaactaattagttacctttattttacggcgaaaatagaaagaggtaaacgaattcattatttttgtaattgaattatttgtgaatcttaattcaattctcattttctagtcaattacttattttttgctggcgttttttcttcaactggttctttcttcaaagtaatcccaattgcaatcttatataccacactctgacatgctaatttcagcaatgtttgttgggtttcagtgaccaatgtacctgctggatttttgccttggtcataggggctgtaatcctcatctaactgatgaatcgctgctaaaaacgttaagataaagtaatcataaagttgcttttcatttcggttaggtgtttccgctgtcatcaattgtttgatttcttcaatcgaaaaactcgttttcaatagtgcaataattaaaacttgagcaatttgcgattttgtataccgttttttaatcggtgctgccacaatttcttttttgacgtaattattaatcattgaagcggtgatttcatctaaatttaacgcgtttaggtattgattgatgtaactaaccacttgatccatatatagtttcaaatcgggcaggtctgtccaacgtggtaagcgtacaatttgtaaacgatcgagtttttgtttcaagtgttcatttttcataattatcaatctccttttattcaatactcattataccaccatctagtatttaaaactaggaaactgcataaaaaaagagtttcttattcagaaactctcgatgacgattagtcgttagcttttggtgtaacaacttgttcgcctttatagaaaccttttggtgatacacggtgacttacacggtattcgccattagttgcatcgaattgtacgtttggtgtgttcaatttgatatgtccacgacgcatacgtttcttcgtctttgatgttcttcttgctggaactgccattattttcagactcctttatatcttagattcattaatgatataccgaactcggggaatttggcaaggattatctcaatcccattcaaattgattttaaatcatcacgtgtcccgctacttttgtccgcgacttctataatactatgtttatccgctaagagcaagtcaattacagaaaaacaattgattaacgactcttaatgacaccactttcaaagtggaatcgtccttaatcgtcactaacattctgtacatcatccctaataagtgtaccatacaaacatcaatctgacagtaataatccctgattgatgtccaaaaaaagcgccgcaaattaaatttgcagcgctttttcaatcgttagcgattttcaaaaactaactggttatcttttaagttaatttcaaccgtggttcctggtaacatatgcccggcaataatttctttagccaatggggtttcgatatggttcgtaataaaacgccgtaatggccgcgccccaaatgcaggatcgtaaccttcttctgccacccattgtttagcagcatctgaaatcgtcaatgtcaattcttgatctgacaaacggtctgatagatcatgaagcattttgaccacaatcgcttgaatatcgttcaagctcaatggtgtaaacataattgtatcatcaattcgattcaagaattctggcttgaatttcgtctgaattaaggcttgaacactttccttagccgtttgtgaaacttgaccttcttcatctacaccgtccagtaagatttcagaacccaagttagaagtcataatgatgattgtattcttaaagtcaaccgtccgtccttgtgaatctgtcaaacgaccgtcatccaacacttgtaataaaatgttaaagacatctggatgggctttttcaatttcatccaataacacaattgtgtatggattccgccgaactgcttcagttaattggccaccttcttcatagccaacatagcccggtgcggcaccgaccaatcgtgatacagaatatttttccatatattcactcatatcaatgcggaccatatgccgttcagaatcaaataaatcctcagctaaagcttttgctaattcggtcttcccaacccctgttggtcctaagaagaggaatgagccaagcggacggtctggattttgtaagccagcccgtgaacgtaatacagcatctgtcacagcattgacagcttgatcttgaccaattacccgttcatgcagaacatcggcaagacgcagtaatttttgtcgatcaccggcaactaatttggcgactggaatcccagtttgggaactaaccaccgttgcaatttcattttcagtaacggattcctgaaccatccagtcctctggcttttcagccttttcaaggtcggcaaggtcttcttctaattgtggaattgtgccgtgttgcaacttagcagccgtttctaaatcataatttccctgtgcttcttctaattgccgtttagcagcatcaatttccgcttttttatcattaatgcggttcaaatcttctttttcagtttcccaccgcatctttaaattattcgttgtttcgcgtaaatcagctaattgtttttgcgtctcagccaatcgtttttgcgaagcggcgtcggtttctttctttaacgcttcttcttcaatttcaagttgcattaattgccgcgttgcttgatccaattccgttggttgtgaattcatttcgacgttaatgttggcactggcttcatccactaagtcgattgccttatccggtaagaatcgatccgtaatgtagcgatttgacaacgtcgcagctgcgactaaggcattatcgtgaatccggacaccgtggaaaatttcaaaccgttccttcaaaccacgtaaaatactgatggtatcttcaacggatggttcttgaactagcactttttggaaacgccgttcaagcgccttatctttttcgatattttgccggtattcatccaacgttgtcgcaccaatcatgtgtaattcaccacgcgctaacattggtttcaagaggttcccagcatccatgctaccttcagtcttaccagcaccaacaatcgtgtgaatttcatcaatgaagaccagaatccgaccttcactcttcttaacttcctttaacacagctttaagtcgttcttcaaattcaccccggtatttggccccggcgattaaagtccccatatccagtgaaataattgtcttatcttttaaattatcgggcacatctttacggacgattcgttgcgctaatccttcaacaatcgccgttttcccgacaccaggttccccaattaaaacggggttattcttggttttccgtgacaaaatccgaataacatctcgaatttcttcgtcccggccaataactggatccattttgccagaacggaccgctttgattaaatccgttccgtatttttcaagcgcttggtaattatcttcttggtttttagatgtcacacgctcgcctcctcgtaaatcagtaatgactttctttaatttttgttcagtgacattttgtttctgtaaatattgaacgagtgcctggtatttcaaacccattaagcccaagatgaccgtctcagttgataaaaattcatcttggaattctgttttgtatttttcagcagcagttaatacttggtacaagttttgtgagatgttttgaccgtaattcgtttgaccttcaaccgttggaattgcgtcaatttcacgatcaatctccgcctcaagagcatcgatatctgcaccggcttcttggtaaatttgccgtcctagttgttgtggttggactaaatatttaaagaggtgtggaatatcaatttcagtttgatgacgcgtcatcgcgattttctgcgcttctgcaagtgcatcttggacagcttgtgtcatttgttctggattcatagacgtcattcctttttcagttattttttaaattaagtgtcagattattctgactaattctataatagtcaaaataggtcaaactttcaagtaattcgcttataaatcagacttaagacggagagctggtaggcgagttcttcctgaaaagtaacacaaaaaaagaggctaagacaaaatctgtctctgaagtgaacccccgatattggaccaaaatccaatatcgggggtttttatattgaccaaatattctaaaacatggcaccattatgaaataaattatgagaattagggcttatctaatgcaaaaataatcactatcgtttacaataagtaagtattaaaaatggaatggggtaaagaaatgacaattacatatgtcgtcatcaacatcgtgatcatgctcatcatgttatttgttttaaacaagatggcccggattcacgttaagtttagtcgccgcgttttcacggcattgggggtcgggattttattcggcgcactcttacagattatcttcaaaacagattcaacggttgtcaaacaaacagctgattgggtcggcattgtcggcaacggttatgtctcgttcttaaagatgatcgttatgccgttagtcatggtttcgattattcaagccattacgaacttggaatcatctaaaggcttagggaagatggccggcatggtcattggaatcttagtctttacaaccttaatcgcagccacagttggttcagtgacagcggatgttttcggcttaaatgcgagtgatattcaatcaggccaagtcgaaaaggcccgctcgaaagaattacaaacgaagctaggcgatgtacaggaacaaactgttcctgaaaaaatcgttagcttcattcctgaaaatccattcatggatatgacgggttcacgacctacatcaacattagctgttgtgattttctcagctttcttaggagtggcagcattacaattacggcgtaaaaagccggaacaagcagaaatgtttaataaaatcgttaacgccttgtacacggttatcatgcgcatggtaactttaattttacggatgacaccttatggggtgttagccttaatgacaacgaccgtagcacaaactaatgttaaaggaattctcagtctaggtgagttcgtgattgcctcttacgtggcattaatcatcatgttcttgattcacttcctattaattacgttcacggggttaaatccaatcaactacattaaaaaagtgattccaacgttaatctttgcgttcacgtcacggacgagtgcgggttcaattccaatgaacattgaaacccaaacgaaacgtttaggggttgaagatgggattgctaatttatcggcttcatttggggcttcaatcggtcaaaacggctgtgcgggtgtttatccagcaatgttagctgtgatgattgcaccaactgttgggattaatccttggagcatcggtttcttggttaaattaatcttgattgtggcaatcagttcctttggggttgctggtgtcggtggtggcgcaacatttgccgctttaatcgtactttcttcaatgaacttaccagtcgggttagccggactattaatctcagttgaaccattaatcgatatgggtcggacagccttgaacgttgatggctcaatgactgctggggtcttaacggctcacttattaggtaaattggataagaacaagtttaatgatatgagtttgacggaagattcagacgaaatggcttaatttcaaaaaatggagggtttagtgatgcgaacgattattatcggtgccacagctgccggaacaagtgcagctgcaaaagcaaaaagaacgaatccagatttagacattacgttatacgaaaaacgggactatgtgtcctttggggcttgtggcttaccttattttgttggcgagcactttgaagatcccaaccaaatgattgcccggacacctgaaaaatttgctcaacaaggtattgatattgcgcttgaacacgaagtactatcagttgactttgatgcgcaaacaatcgtggttcgggatttgaaaaccaatcaagatcgcacagaatcttatgatcaattaatgttagcaacgggagccacagctgtgatgccaccgattaaaaatgttgatctcaaaaacgtctatcatctacggacgatggcagatggacaagccttacgtgaattaggacaagacccaaaggttcaatctgtaacggtgattggtgcgggctttatcgggttagaaattgccgaagagttccatcaattagggaagcaagtccgggtcattcaactagaagaccgaattttaccactggcttttgatccagaactaacggacatgttcgcggatgacttacgtgataacggcattgaattacacttatcagaagctgttcaagccttagaaggaactgttcaggtgactggcattgtgactgataaggggcagtatgcgacagacttagtgattgtagcagctgggattcggcctaatacgcaattcatcacggatgatcgattgaagaagttgccaaatggtgcgattattgtcgatcaagcagggcggacatcgattgaaaatgtctatgccgctggcgataatgcaacggtcattaacagcgtgacgaaccaaccgatgtattcagcacttgccactggtgccaataaattaggccgaattgtcggcacgaatttaggcgggcaagccgctcaattaccagggatgttgaattcagccggtgtgaaattaatcacgctagaagcgggccgaacaggtttgactgaaaaagaagcggcagaggctggtattgatttcagtactgttttaatccacgacaagaaccaaacgaattattatccaggccaatcagatttaacgattaaattgatttacaccaaaacagagcatatcttaattggtggccaggtggttggtcaaaaagacgcagtgttgcgcgttgatgtactcgcaactgcgatccaagcgaagatgacaactgaacaactcgggttactcgaccttgtttatgcaccaccgtttgcaagaacgtgggatgcactgaatgtggccggcaatgttgcccattaattaaaaaaaagtgacaccgcacaaaccgtgtagtggcgctttttttgttgcatgcttaaacagttgttcatagtgtttacttgaatgtttactcgggtctgtgctaaaattgcatttagaaattaaatttttgcaaagttagttatgaattaattacgatgattaagaaaacacaaataaaaaatttatcgacaggagacagtttaatgaacaacacaaagagtttgattgcattgagttctggaattttaggggcagctgggatcggtttattgagtgcagggcaagtacaagcagcaacgacagcaaccgtcaactacgcagatggtgcaacaactgtttggacaagtccaacaactggtcaaactgctaaacgatacatctttaagggccaatcagtaaatcttttagcatcacaaaagattggcgctgaaacatggtaccgaattggaaacggcgaatgggtacctgaacgttacttaacaaccagtgacgctacaccagctgaaacaacaccagcaacagaagcacctgctgctcaaaagacagctcggattgcctatgccggtggcgcaacaactgtttggtcaacagcaacttatacagccccaacaggccaatacttaggttatggtcaaaccgtcaacgttgtgaaaacagaaactgtttctggcgaagaatggtatcaacttgaaaatggtagctgggtaccagctcgctttacaggtgatggtaagattgaagccacaccaacgcccgttgcacaaccggtagcaccagcacaacctgcaacagcgactcctgtcgaaacaccagctgcgccagcaccagttgcaacaacaccagcgcaaacagaaagcacgcctacaacaccagcacctgtcgcagaaagtgaatcaacaccagttgaaacgcctgccacactagaaagtacaccagctgtagcagaaagtagtgcgcctgctcaagcagaaagtacaactcaaacacaacaaccagctactcaagaatcatcagctcctgtccaagaaactgcaccagttgaaacaacaccagccccaactcaaaaggcaccagttgaaacaacaccagccccaactcaaaaggcaccagttgtaacgacaccaacaccagccccaacggcacctgcagcaacgactggtaatgcgcaagctgttattaatttagcgatggctcaaattggtaaaccttacgtttggggtgcccatggtccaagtagttttgactgttctggattaatggactatgtcttcagaaatgctgctggtaagagtatcggtggttggacagtccctcaagaaagtgccggttatgctgtttcattaagcaacttgcaacctggcgatttattattctggggttcacaaggtagctcacaccacgttgcgctatacattggtggcggacaatatattcatgccccaaaacctggcgaaaacgttaagatcggttcaatgcaatactatgcaccaagttttgcacgccgtgtcttttaatgattgcaattaagcgaacatctcacctaggtgggatgttttttgtattttagccctaaataagctatgatatgtagagatttaaaaaaggactgacgagatgaagatagaagtacaagcatttatcaatcaaattcaagatcaaacatatttaacggatgaatacgagctccccacgccagatccttttgtggcggacggtattttggcacagttaaaacccgctattgataaagccattgaaaaacaagctttggcctctttttcggtgctgacagaatatgctggcgaacccgttaaggtgacattggaaacggggattgtgaatctaccattacaatacattaaaaaagtaaatcaattttttgaactcgacgaccaagcagaggtgaatctttatttatatgtgacatcgccactcattaatcgctcgaacatgcggattgacttaattgggacggtagcttcgtttgaagaatcggcagctgctaattggacgaagattgccgacttgctaacaaaggacttggaagccgtcgtaatcggttcacaggcgcctaaagaagaaccagtcgaaaagaaggcgcccgctaagaagaaagccgcacctaagaaaatggcaacgactaagaaaaaagcgcctgccaagaagacaacagctaaaaagacagctaccaaaaaagcaacgactaagaaaacaaccaccaaaaaaaagactacgaaaaaagcagactaatttagtctgcttttttgatggcgtctattaaaggcaagtcgccgttaacaaacgagaatttcttgtggattgtttcggtcggatgttctaagacggtgcaaatcatcgcagcgacatcagcacgtgcaacttgtccaccagatggttgcattgtcactaggccggtagcttcgtcgtttgtaagtgtcccaggacgcaagatggtccaatctaaaccagagaattcaagccagtgatcggcatagtattttgcagcgtagtacggtttaatactttcaggccatttagttcgatcctcaacaaagagtgcactgaccatgacgtagcgactaacttcagcaatcttagctgctgccatactcttaacggcgccatcgagatcaaccaacagtgtttgatcatcgcctgttttaccgccagaaccagctgtaaagacaatcgcatcatgatcggcaaatagtggtgctaaagccttaggttgtttggttaaatcgaataagacaggcatggcccctagttgtgcaagttcatccgcctgttgttcgacacgaatgccggctgtaacggtgtgaccggcagcaacgagttggctaattaggagctggccaacgttaccatgggcgccaataacaaaaatccgcatagtaaaacctccaatataaatgtgtgtgctgtccattatagtagttattgaacagtgacgcaaagatagtggatttaaaaacctgtgttgtagtacaataaaattcggcaccttgcgaaaaaatgagtgtgctttagggtatataatcttgaaagtggctgatggcaacctttaaataggcaaagctaattatgggattcgttttataaataaatctaagaatcctctcattttttcacaaagttgcttattagaatatcatgaagccgtgtttgttttgtgttatggtacagatatagagattgtgatttattggataagtagtcctatttgttaatgctatctcagaaagtaggaggagaacatgacaaatcaatatcggagcgtttttgatatcattggaccgattatgattggcccttcaagttcacatactgctggcgcagttgccattggacatgttgctaatcgtctttttcatgcaccgattaacaaagttattgtgcgttactacgaatcttttgcacaaacccaccaagggcacggtaccgattatgcaattattagtggcgtgctaggattcgatccggccgatcaaagggtaccaatggcagttgatttagcgcgacgtcaaggtattgacgttgtcttcattgaagatccagggaatagtccagtgcaccatcccaatacagcggaattaacgttaatcaatcgtgagaaggaactaacgatttggggctgttcaattgggggcgggaccatcgaaatccgccaagtgaatttgaatggcattgtgattaaaacggatggcccgttaccattggtttttgtcgaatcggaacaagaaatcggcgatgctttagaccagatatttgaaggcaactatcgtgataagcgcatatcggttaaagtgccagatcggtttttgtataaaatcgaactgattgataagccgtacccggaacagattgaacaggtccgcggaatgagccaagacgttattgtgttatagaaagtggtgggaagatgtatacaacaattcacgaattagtcgagacagcgcaagaacggcaactaccaatctcggaattgattatcgaacaagaggttgcgatgagtcacactagtcgtgaagtcatttgggcaaccatggggaaaaacttggatgtcatgattgcggccgaagaaaaaggcgtgaccggtgaaggtgttcagtctgccactgggattacaggcggtgaagcggttctgttgaagcggtatcgggaaaagggaaagtcgttatcaggtgatgtgatgttgaccgctatgcaaaatgcggtagctaccaatgaagtcaatgcttcaatgggaatcatttgtgcgacgccaactgctggttcagcaggtactttacctggtgttttgtctgttattactgagcgcttggcgcttgatcgggatgcgcagattcggttcttgttttgtgcgtcagcctttgggatgattgttgccaataaggcgatgattgccggggcaactggaggctgccaagccgaagtggggagtgctgccgcgatgggcgccgccgctgcagttgaagctgctggtggcacaccacaacaatcgtcggaagcattcgcgatggcgatgtctaatctattgggattggtttgtgatcccgttgctggattagttgagataccatgtgttaaacgaaacgtgattggggccgtcgatgccttgaccagtgctgatatggcattggcagggctaatcagcaagattccagctgatgaagtgattggtgccatgaaacgaatcggtgaagatatgccatctacattacgtgaaactggtttaggtggattagctgctacaccaaccggggttgcattgaagatgcaaatctttggtaaggataagagccttaaataaaagcgacttttaggaggaacaattatgcaaaagaaactttcaaaatccgcatacggcggtgtttcaggtgagaaatatgtaccgtatgtcaaccaaggcgacaaaaaggtcggcaacttagcgattctaataatggggagcattttagccattatttttgctgcttcaacagcttattctgggatgaaggccggtttaaccgttgcagccgggattccaggttcaattattgggtctgggttagtcggtgcctttgccaaatcaaaagggattttaggcaagaatattatgcaagggatgtccagtggtggtgaatcaatcgccagtgggatgatttatgttttaccagctattattttaattggtggccacatcaacttcattcaaggggtcatcgttggggtgctcgcaattcttttttcaatggggacagcctcattagtgcacaactacttaatggttgaagaacatggtaagttggtttatccagaagccatggcgatttcagaaaccttagttgcgtcagatactggtggcgattcgcttaaatacatgggcgttggctttggtatcggtggggttattacgatgctaacttcatcagtgtttggtgtcgtcaacaacatgattagctacgttggttcatcattttataaatggaaattggacgttgaagtgaatccattacttgcaggaattggttttatcgttggattagaagtgtcattaacaatgtttgcgggtgcgattttatccaactttgcgattgcaccgttaatcggttatttcacagatatggcgggcaacagtgcgcatgtttggaataacacgagtttagccgtgaatcaaatggccgttaacgatttatcaagttcatacgttaaatacattggtgccggaatgatgctttgtggtggtttaatcggtgcgattaaattaatcccaactatcgtgacatcaatcaagaaaacactagctgctaaaaacgtagcaggcgaagaaaagaatacacttggtatgattgccattgttgttggtggtgttgggatcttcgttattggtattatcattgcgcaaaacttcttaatggggattgttggtgcattactagcagccatcttaagtttactctttgtcattgtttcagcccgggttgctgggacgattggttgttctaacttgcctgtatcagggatgacaattgcgtcattagtgattatgacggtagtcttcgtattatttggttggacggacaataaccatacgcaaatcttattgatgttcgggacattcgttgtgaccgccgttgctgttggtggtggctacatgcaatctcaaaaagtaacatatgtcattggtggttcaaaatctgaaatgatgaaatatttcatgattgccgggattgtcggcgtaatcgtaactgtcggcacaatcagcatcttatcaccacaattcgttacagatagtgcaacaccagcctttgggttaccacaagcgaacttaattgctacattaacatctgggattatgacgggtaaattaccatggatcatgattatcgttggggttatgatggcattagctttctactttttagatttaccaatcatgaccgttgcaattggtttttacttaccaatttcaaccacttcaatcatcttgatcggtgctttgattaaagtctttattgaaaaagcaacgcgtgatgaagcgattaagaataatcgggttcaaagtgggattagtttatcatccggtttaattgctggtggttcaattattggtttaatcgggattattctccacgtaaccggtgtgttaaaagatcgcgtaattactggttttgcgaataccaatgcaatggggattatcttattggttgtcatggttgtttcgattactgtgccacttatgatgattcataaaggaggggcaacagaagatgggacgacagaaagcggagattgatttagaacaactcatctatgaaaaaaatccgcaagttcagtttaagttacaagctggccaggtcaccattattcggccgcagaatcactggattcaacggacattacggcgtttgcatgtgaagattccgctagaaacacagctggaacttgatgattatggtagttttgtctttaggcatgtgaatggaaaacgcagtgtccaccagattggccaagcactggcaggacagtatgatgaagccggtgaatacctgtatgaacgattactcgtgtatttgaatcatctagaacacacagaacatttgatccggcgggtaaccgactaagttttattaatcaattagtgaatcacatttttaataaaaaggagtttttcaaatgacagacagaatcgaattatcagcatgtacttcaatgatggtagggaagaatgcgtcaattgatggctctacgatgatttcgcgaaatgaggatcgcttctatgcaatccatcctaaacggttcttcgtacaaccagcagttcatgatcgacatgagacatatgtttcaaaatataacggcttaaccatgccgttaccgacggacggttatcgttacacatcaacccccaacggcgatttaagtgatggtttaaatgaagaagacgggattaatgaaaaaaatgtcgccctctccgcaactgaaagtgtttatgccaacgaacgggtattagcttatgatccgttggtcaagcaaggtttagctgaagattcaatgtgtacgttggttctgccatacatcgattctgcacgtcaaggggttcaattgatgggggatttgattgctaaatacggttcagctgaaggtaatggcgttcaatacagtgatcaaaatgaagtttggtatcaagaaattgttactgggcatcactgggttgctgttcggattccggatgattgttatgcagttgccgctaaccaaattgccatcgaagatgtcgactttaatgatccagaaaattacatgtggtcagaaggtattcaagaattcgtcagtgaaaatcacttgaatccgagtgaagctgaatggaacttccgtaagatttttgggacggatactgaattagatcgtcactataacacaccacgggtttggtatgcacaacgctatttgaaccctgaaatcaaacaagaacctgaatcgagtgacttgcctttcattcgcaaggctaaccgtaaaataagtgtggaggatgttcaatatgtgttaaaatcacattataacgaaactatttacgatccacttggtaatgggacagaagaacaaaagacgatttatcggtcaatttcactttcacggacgcaaaactcacatatctgtcagattagaaacaatgtgccagatgctgtgcgtggtgttcaatggttaggtttgggggtaccaacattctgtccacacgtaccattctttacgaatgcgatggatacggatgaaagttatcgcgaactaccagcgaagatgcagttgaagaacgcttactggttatatgaagcattagcaatgattgttgaatcacactacggggcctttaagaaagctgatattgactaccaaaaagcattatcagaatgggcaagaactaagattgctacggtggatgctgctgtaaaggcggaagcgaatgccactgatttcttaacccagcaaaatcatgaaattgctgcacattaccatgaagcaacaaccgatttgttagcgcaattggtgacagaaggaacgcaactttctaagttgaccttcgtcatggataagaacctatagccaagtgcgcactttaatcatttgtcacactcttccaaggggggagtgtggcttttttaatcgatggaggtgctacagtgattgctttaaaaggaaattcgaaaaaaattattatcgcgatggtatacggttttttggcggcggtgagtgttaatctgttcttgattccggcgaagacgtattcgagtggggtcacggggattgcccaattactaacctcgttagtcagctatatgggcggctcattaagtgttgcgatgttggtctttattttgaatgtgccattattgattctggcatggttcaagattaatcatcagtacgcgatttttagtatcgtcgctgtttttacgagtgtccttttcttgaaggtcattccagtacctgttcacccaattgtcaccgaacgatttgcaggtgccttgttcgggggcgcattgattggtttaggggttggcttgtgttttaaagcgggtttttcaactggtggcacggacgtcattgtgacgttagttgggcgcttaactggcaaacgggttggtgttgtgaataatatcatcaacggaatgatcattcttgcagcgggcatcttctttggttggggtgctgccttatacagtatcgtcgaaatctttgtttcaagcttgttgatggattatatctatattcaacaacaaaaggtgactgtgacgatttttaccaagcgacctgaagaattgaagaagcgaatgcgtgactttattcatggtgcgactgaattagatggaactggtctgtataccaaccaagaaacaacagtgatcatgacagttgtttcaaaatacgatctaacggaattaaaacgggtcgttaaggatgctgatccgaatgcctttgttaatattcaatccacaatgaacttgtggggtaaatttgaaaacgtcgaataatagtagctatcctctggaactaaaaaacggtcctttcaataacgctaagttgtgaaaggaccgttttttttatatggtttggcggagttgaccgtcttcgatacgccaaacgtgatcgacgagatctaaaacccgttcgtcatgtgttaccatgacagctgcgcgtttttgttcatgaactgcatcgcgaattaagtggacaatttcacgaccacgttgcgcatctaaactggcggttggttcgtctgctaaaatgagtgcaggttgattgataagtgcctgagcaatggcaacccgctgcttttcaccaccagaaagcatagcgggataactatgtaatcgatggcctaatccaagttgtgtcagtaattgttcagcggcggattgatcgcgacgacgggcgattttttgtaaaaaagtcagctgctgagtgaccgttagatagggaattaattctgaactctgaaaaataaaaccaattgattcgcggcggatttgtgtttgacgattacgattgagtgttgcaagttcttgaccggccaaggtaacacgaccggctgtgggttgcaagagcgcgcccataatcgtcaacaaagtacttttaccaacaccgctgggaccaacgatggcgctaaattcacctggctgaatcgtgaaggagatatcttttaaaatgtgattaatttgatcaccatcgggataatctttggtgatgtgttcgagtgttaaaatcggtgctgacatattaatgccctccaatagctgtgatcgggtcaatccgaatcacttgaataagggataatagggcgcttaggatggcgacggctaaaaatagaacgctggtgccgatgatcgttggtgctgtgagcataaacggcatgctggcaggcattgactgggcgatgacactaatgataccgccagccaaaagaatcgccactgccgttaacaagccaatctcagagatgatgtgctggctgagatagcgtgtggttgtgcccaatgcttttaaggccccaaagtcccgtaatttctgtagggtaatgatataaaagaaaattgcgaggacaaacagtgagatgacgtataaaaagccgatcatcaagtacaatgaactttgttctgcagagtagccagggatgttatcaatcaaggtttgtttgctgatcacttggtagtgcttgttaaccgacaagggccgtttgctagcaaacgcgttataggtcgtcttttgcgttggaaaaatggtttgccactggtggtggtttaaataaataacaggcgtatgggcataagccatctgcttgctaaagccgccgattttaaattgctgaccagtggtactgtctttaaaggtgtcgcctaattggtaaccattggcttgtaacttgctgctgaccaccactttttgggtggcttggttggacagcttttgaccttgggtgactttgggtgtcatgaagctcgtagcgtcaactgcaatgtaggcaatgtcagtttttgtttgttttttaggccgctcgatggtggcttgggtgacgttgatgggtgtcagtgattggtgtttgagagcttgccaatcagattgggtgagtgccgagcgactcaaccgactttccgaaccggcttgtaaaacaaaatgcgtcgccggcgtatttttaatagccgcgccactatcgtttgctaaaccggcagctagtccggtgatgaagagtactaggaaaacgattaaaaagatgataaaactcagtgcgccaaattttaacttattatggcgtaattcttggattgttagaaacatatgccgacctccgatgacttgttattaaggctactataacgatggttagttgattcaacaataatcaatctaagtgtttctgtgttataatgcacacaagttagtcaattgtgatgtaaatggaggctgaaagatggttaatctgcaagacagacgggttaaacggacacataagttaattcgcacaagttttattgagctcctgctaaaacacccaattaatgagattacaattcagatgattgccgaccgggctgatattaatcggcggacgttttatttgcgttatacggatatctacgatcttttaagccagacagaagattttaccttaaatgagttcagccagttgctagaacgttttgagttgccttctgaaccacagattgttggccaaactttctttagatgggtcttgtcatatgtgcaagacaacgagtctatgttacgggtattgtgtcgtaatcccgattcacagttaatgaataaattagttgcgttgaccgtgactcacggcaagcgggtgattccatttcagcagccggaaaacgctgattatattttgaattattgttgttggggtctaatcggtgttttgcacactgcattgtttaaaccagcgtttgacgcccagcaattggcgctcgttgctgaacagttattgaatgcttctttacaagtcagcgaaattaaagcatagaaaaaagcccaccggtaaataaatgtcggtgggcttttttctattttattttgctttagcagcttttaattgcttgaggttaacaacgatcttgttgtttaattccgaaacgttggccttgtcggctgcatcgaaatccgtaatgctaattaaagcggagttttcatatactttttcaacagttcctgtaaatgcaccatctaggtcttcgttcactttgccggttactaaatcaccgatattgagattttctttatccatagccaaaaactccttcagacattattaaaattaccaaataaggtgataataaactatgtcatggtaaatagcaagacttactgctataaattaatcgtttgattgtgaatgaaacgaaattggctatttaattccccatctaaatacgctaaaacgaagaagtgttaccggttacaaatcaaaattgaggggaattcatatggaaccttacttagttttttcagatattgatggaacgttggtccttgaccatcaaatcgtgacacctttgaccaaacgcgtgattcgaacattacaaaaacgcgatgtgattttctatattgccaccggccgaatgtacaatcttggccgggtaatttcgcggcaaattaacgatgatgtccggattgtggcttctaacggtgctgtctttgaaaatggccatcagatgaacaagcattatttaggtaaaaaagtgctcaaagctgcttacgaagcatgtttagcagatcccaatttatctgcgcacttttttaccactgacacagcttactatacccaagaaatccccaagtttgttgcgcgcgatgcggggaatttattgttgaatgccgatattgataatcaaacggtgactgatttagaaatgttgttgaatttaagtgatcagattactaacgggattatcattggtcgcggtcatccagagagtttagcagccgctaaacaacgattaatggatcaagctgtgatgagcttgtcttcttctggtccagacaacatcgagatgattccaaccgggattgataaagccactgcaattcgccagattcaaatgattcatggcattgatgccgatcatacaattgtctttggggatgggcaaaatgatttgggaatgttgcaatcagcgaagtacagtgttgcgatggacaatgccttaccagaggtcaaagcggctgtaaattatgtaacagaaacgaatacgaatgacggggtcgctaaattcttacaacaacattttgaattagcactttctgatacagaagttggtctctaggggcttgacccgctttttatttttcgatatacttatatcacggttgttaatcaaccgtgaaatgctgttttagctcagtaggtagagcatcaccatggtaaggtgggggtcgtcggttcaaatccgataaacagcttaaaaaattgagtgtgactcgaactgggtaggctttgaggattaacagggaaaagggcattatggcgggacttgccataatgccctttttgcagttaaccggagaagactgttcgaggagcacgttaaaaaatgagtgcattcaagcttggtcaacttttgagcattaagtcgagaataaaaggcggacaacatttctaacatgttgtccgtcttttttaggcttttctggttaataaacgttcagttaattgttgtagcgttgtttttgcgggcatgtcgggtagtttcgcaagaccagcgagtgcgcggtttgtgtaatcttgtgcgagtgcttgggctttttcgacacttccagattgacggacgatgccttgaacagcgtgcacatcggcatcagtcatagctgcttgtttttccaagtagggtgctaatgtttggcgattggattgcagtgccatgattaacggaatcgagtagacgccgcgtcgcatgtcatcgagaactggtttgccaaaatcgacatcggtctgagtgtaatctaagatatcgtccagaatttggaaggcgagaccgatatttaagccgattttctcggcttggcgagcaaacttcaagcctttttggctttcgtaagcaccgatgaagcaactgagcgcgaacagttggccggttttaccgttaatttgttgtaggtactgttcgggggttaaatcgagattatatcgggttgtcatctgactgagttcaccgtcaagaatttgatccatcgtttggctgttaaattggatgctcttcaaatcgctcgcataattggctagtaacttgaagcagacaacgaataagtaatcgccagcgtaaacggcgacatctttgccgaaacgggcttgaatcgattcttgatggcgacgtaaattggaattatcaacgatgtcgtcatgaattaatgtcgcagtgtgtagcgtttcaacagcggcggctaatgcgatcatcttctgtcgatcgactacattaaactgtgaaaataataagcagtaagcagggcggagcaacttgccgccagcactaatcatctttaaaatggcgtcggtgacggcttgatttttggtgtgaatgttgtcttcaatgagcgcaagactttgcgcaagttcggtttcgatttctggatagttctgccacatggcatgtactttcgccataattaactccttgttaaattaaatttcgtgttgggcttttaaaaaagtcagggttttgacatgttcgaataaaaaattcgcggctacgccgaccgcaattccggcgagaataccgagaaaagcaagcactggtagatagaggaggacttgccaactctgggcaatgaaactcgcgacgcagagttgaccgacattaaagagcagaccaccagcagctgagatgccaatcatactcataaagcggcggctaaattgcttgaggagtaccatgccaaagaaacttagcgttgccccagcaatgctatacataaaagtagagagggttccccctagcaaggcggataaaacagttcgcatcaccatcaataaaaagcagtcgctgaccggtagggtaaataacgaaatgatggtaattaaattggctagtcccaacttagcacccggggctacggcaaatggaaatggaatcgcgcgttcgacaaggccaataataatcccttgagcgcacaagagtgcaatatagatgtatttacgcgtttgatcgttagtcatcgctgtactccttttaaatcaggcagaaaccatcccgtccgtgtcggtcccatccttggctttaatttcaatcagtaacttgtgtggtaagcaaacaatggtttggcctggcttagaaattttgccacgcttaacatcaatctgattgaagcaattggcttcagtgacctcaatggcatgatcggttaccttaattttgttgtaatcaccgccggcatcgcgataagtgaagtggctaacaccatggtgggtggttaggttcactttgtagacggttttgccatcgtgtttgacgtaggccgtcaatacctgcgcgtttgaatccgctgcttgcgtcgtttgccattcgtgccaactaaaaacagcaactggggcaaacgatagaataaacaggccgatgactactattatatcaccagggcgaatcattttgatgtaacggttagcgcgaatttgtttaaacataggcgtcagtctttctctctaaaatagcaataaaaggggttatgacaaaagcctgtctgtcataaccccctccttttgatagctgtgaattgcttttataatgtgctttcaaaagcattctattgcgtttagcactattagccaaacaactagctacgctagttattcgtctaattttgctaatccgcatagaataaacgcttttgacgcactcagttttataatgtgctttgaagttaactttctgcgtttagcgctgtgaatcaaatcatcgactatgtcgctaattcgcttccctgtgctaatgcttaaagtcaaaccgtttcaaacgcactcattgatttttgtatagtgcacgttgttggccgtagcgccagtgaccgagatgtttttgtaaatatggaacaacccatttatctaatccgaaggcacggcctgaaccgttcatgcaggcgagggccattggaataatccaaatgttaacccaatagaacatccctgaaaggcagaatgtgataaccattgcaacggttactgcgctcgttaaccaagtgaagagaccagcaattaaagctaagccaattaaaatttcaatgatggtcattgttttttgcatgaagaaggcgacttcttggtttggaatcaagaccttcgtgatgctgtagaaccagtggggcatcttatcgaagacgggcattggatcatgaccgaataagtaagaaaggccgaatgtgactttagcagttgctggttcagcagccccgcctgcagcggcaccgctagcagcacttgttgcatccgccgctttagaagcaccgctggtgacagctggttgaagccagtcaaaaggtaaccggagcttattggtgaaccaagaaccttcaccttgaaccttgtcccaacaatcaacaagccacattgcgcctaagaaaattcgcgcaggaactgtccataaaatattaccataccgtgaaatatgaccgcgcatcaagttgcgatcgttcttcgttctgaagaactcattcattgaatagtggaataaatcatagccagaataaatctgaacaaaatagagcatgttgactaaatgtttaactaatgtggcaaagaacccactgagatggaagaaattcatcaagttggcaaccgcatagcgagaaccaattgaaaccatgaagccggaatagctccctttgtatgggactgttgctttaccttcttcagttgcgatgatgttctttagggctgttgcagcagatgcttcggcgccttgaacaatttggggttgaccgcggccgtcatcagtttcatcgaagaaagccacatcgccgacaacgtaaatcttgtcatcatcaacagattgcatgaattcgtttgtcacgattcggccggctttaccggttgttaggccaaattgtgccgcttgtgaggaagctttgacaccagctgtccagattagagtggcagttgggaaagttgaaccatcatttaaatcaacatgcatttcgtgaacacctgtaacaccggtattcttgcgaacatcaattttttgtttagccatgtagcgttctgctttggctgcatcgttgcggtcgagcatgttcatgatggttggtgccatttccatcattgtaaattggatttcttcgggatcaatcttgttatcagctgctagttcatcacgccagtcgcgtaattcgccgatagtttcagttccggtaaagccagaaccaacaaccacgatattcaaaagggcccggcgtttttctgggtcgtgttcaattgccccacgacgaacaacatcgataatatgttgcttcaattcaacagcctgttcccatgaacctaaagtgaaaccatgttcggcaaccccaggtgtgccaaagtcgttaggttcactcccaatccccaacataacttgatcataggcgtagcgtccatgttcagtaatgacggttttgtttgcttgatcgatgcgggttaccgtatcggtcaccaacttaacgtttttgcggcgacagaagagatgttgcaaatcgtgttgaacgtggtcttctggcacgcggttagcagctacttcgtgtaattccgttaaatacgtaaagtaggaatgtttgtcgattaatgtaatttgataatctggattcttcttgtaatatttcgcaagttttttagtcgcatagatcccggcaaaaccggcaccgatgatgacgatgtttttttgagccatgatgagccacccctaaatgaaataaatgcgttttcaatcagtatccattatacagaataaactaaagattgtctatttattcacggataagattaatgggattgatgactattaaggaaaccgttttaaattgtgtaaaaccaaagttaatcgccgtaaaataagtgatttaaaagacttgaactttttacataaaaaagataaactgactttgtgtgaaggttgatacaaactatatgattatttatgaaaagggcgggaaaattatgaaattaagtaaagcaatagctagtttatcagttgttgcaatgtcagcaatggtattagcagcttgtggtaatagtaataacgctaaagattcatcttcaaaagaggcaaaatctagttcagtcaaagaatcatcaagcaaaaaagcaaccgctaagaaacaagttgccggcggtgaattaaaagacggcacttacaacttagaagaaaagaactacgaaaataattatcgcgttaagatgtcaatgaccgttgccggcggcaaagtgacaaagacaacttacgattacgttgataaagatggcaagtcaaaacaagatgacaagacatacaacgaaaaaatgaagaaagtttcaaaaacaaatcctaaagaatatattcctaagttgaacaaagaatttacagataaaggtgcagatgtttcaagcatcgaagtcgtatcaggcgcaactcatagctcaaattcatttaagaattacgcacaacaattagtgcaagctgctcaagctggcaacactgaaacaatcgaaatcgacaatggtgctaagatgcaagatggcacatataagttagaagaaaagaattacagccatgactatcgaacagttttcacaatggtggttaaagacggtaaaatcactgaatctaaattcgataacatcaataaagatggcaagtcaaaagctgacgatgctgcatacaacaaacaaatgaagaagattgctaagactgatcctaaggaatacatcgctaagttgaattctgaattcgtcaaagcacaagaaccaggcaaagtagatgttgtttctggtgcaacagaatcatcacacagcttcgtcaactatgctgaacaattagtcaatgctgcacaaaaaggaaatacagcaacgattacagttgataacatcgtttacggtgaataaaacgggacttcggcagtcagctgccaatgaattaatgggtaactgtctgctagaaggtacgatgaagctaggacaagtcaatttgtcctagcttttttaatggaaggaagtccgagatgtcttttaaaacgtttttagaatttgtccggattgaggtcaagacagcgagtgtcttgcctttaatcttagggattgtttattgttggtacgttaatggccagctgaatccagtgacgacagttgtttattttgtcgcccagttttcgattgcattatttgtgactggctttaataatgtgatggattactacaaagcagttgatctggattatcgggcacagacgaatatcattgggcgcaaacatttgtcgccaaccaaggcactgcatttaatgctctattttttattgttcagcatggcggctggaatttggttggtttggcaaacgaatattttattactattaatcggtggcgcctgtatttttgtggccgtcttttacacgttcgggccagttccgctgtcgcggatgccggttggtgaattgttgaatggtgtgacagaatcatttggtgcattttttatcatggtctatgtcaacgtaccaagcgacagcatcatggcgctccattttgattggccaacgtttacccttaaaggtcaattaccaacattgcttagtctatgcctaatcggtgtgattattgcaatccctacttcgaacattatgttggcggataatatctgtgatctagatcaagatcggcgcaatgaacgttatacactgccgcattatttaggaacaacctgggcgttgcggttgtataatacgttgatttggttctcactagtggccgttgttgtggcagtgattacgaaggtcttaccgattgaatcgttactattgttattattgattcctgtcattttgcgcaataatcgccggtttaatacacggcaactgaaggatgtcacctttattaccgcgattcaaaatgcgatggcgatcaatattagcttgattgtcagcttgttattagcgattgtccgcacgacctggtggggataatccaccacattgacagtttggtcaacacatgataaagtaaatgggataaacgtcaattagagaggggcttttcatatgggtgttaagaaagtcgccttagcctgtactgtctgtggctcacgtaactactatgttgctgagaacaagaatcggacagaacgtctagagttaaacaaattctgtaaacattgtgggcaatactcacaacacaaagaaacgcgctaattaggaggaaataagatgattaagttttttaagagtgttggtcaggaaatgaaaactgttagttggccagatgccaaacaaacacgtaaagatacatcaacagtcgtcatgacctccgttttattcgccattttctttggcgttgttgattttgcaatcttaaaagtactacaattatttatcttttagaactggcttaattaagtcggatttgctatactgatggcaagcaaaaaacttcgcgtggtcggagtttttttattttggtatttaaaaggagaattcacatggttgaatcaatcgaaaaaagttggtatgtcttacacacatattcaggttacgaaaataaagtgaaggcaaacttggaatcgcgtgcccaatcaatggggatggagaacaatgttttccgcgttgtggtgcctgaagaagaagaacatgaaatcaaaaacggtaaggaaaaagtcgacatgaagaagactttcccaggctatgttttggttgaaatggtgatgtcagacgaagcttggttcgttgtgcggaatacaccaggtgtgacaggcttcgttggttcacacggtgccggcagtaaaccagccccattattagacgatgaaatcacacaaattttgcgtcaacttggcatgagcacccgtcatttggatgttgagttcaaagtcggcgaatctgtgaagattatcgaaggggctttcgctggccttgttggtcaaattacagaagttgacgatgaaaagatgaaattaaaggttaacatcgacatgttcggtcgtgaaacagcaacagaattagactacgaccaagtagacgaactagtttagagtgcgacttcaggcgggatgactgaaggagcacgtttcgaaaaaagagtgcgtttgaaacggattgactctgagcattaacctaatttggcgaattggtgctacaagcgccgatttgacaaatgtagttaagcgcaagagtcagtttcaaaaagcacgtttcaacaattaaagtagggggctaggatttgtcccaagccccaacaagataggcggctgagacgaaagatgatttgtctcagccgctttttttgaacaatcaatagtgtctatttcgaaagaatgatgtgatgacgatgtggtatatcattgatcaaatattaactgcagtgggcttagtcatttttttgttagtcttactggcaggactggatttttacaaactaatccgggtttcggcacattggcgaccgtgcgcacgtttatatacaaaacaaccaacgctattcattcatggctatcgggggaatcgctattcattcggtcacttactcggacgcctacaaaaagccggaattgctaagaagagcatggtcatttgggtgggcagaaacggtcgattgcatgtggatggagacgcggcgttgcaggctaataacccaacgattcaagtcttatttgctaataaccgcgccgatgtgcaagatcaagtccgttggttagctgcgattattgaacacttaaaagaagcgtatggcgttacgcaagttaatttagtagggcattcgatgggcgcaattacggtgttgcgttatttgttgacatcagaccatgccgtggtggacaaagtgatattgttggcagcgccagttaatgatccatcaattggtccggatacaccacttgttttttggagcgagttaaccagtcgtggaccagttaaacgaacaagtaattataattatttagccgtgcgggccaagtattttccaactgcgatcagtgtcttaaacattgctggcgagttactaggaactaatcgacacgatggttcggtagcagtcgatagtagttttgcattgcgtagcctattaaaaggacacgtgcgccattaccaggagatgttagttcgtggaccgggtggagcacatagcatgttgcacgaaaatcgtttagttgatcaagccattgatgatttcttgtggcgcgattaatggaatcgccttgctttttcggcaattgcttggtatattattaaggtatgttttcatacactagtgggagaccaaatataatggccatcttaaccacatcacggacttaaggaggtatgtttcgtggctaaaaaagtagcaaacatcgttaaacttcaaattcctgcaggtaaagcaactccagcaccaccagtaggtccagctttaggtcaagctggtatcaacattatgggctttacaaaggactttaacgctcgtacagctgaccaagctggtttattaattccagttgtgatcactgtttatgaagatcgttcattcgactttgtaacaaagacaccaccagcagcagttctcttgaagaaagctgccggtgttcaaaaaggttctggcgaaccaaacactaagaaggttgcaactgtaactaaagctcaagtgcaagaaatcgctgaaactaaaatgcaagacctaaacgctgcagacgttgaagctgctatgcgcatggttgaaggtactgcaagaagcatgggattcactgtcgaaggttaattcatgcttgacactttcagtcggattttcaatgaaagttgaaaaatcaagtgggaggtcaaaaaccgttcaccacaattgcaaggaggaaaaccctaatggctaaaaaaggtaaaaattatttagaagctgcaaagcaagtggatgctactaaagcatacactgttgaagaagcaatcgacttagtaaagaaagttgattttgcaaaattcgatgcatctcttgaagttgcatatcgtttaaacgttgatcctaaacaagctgatcaacaaattcgtggtgctgtcgtactaccaaatggtacaggtaagacacaacgcgtgattgttttcgctcaaggcgaacaagcaaaacaagctgaagctgctggtgctgacgtagtcggcgcagaagatttagttgaaaagatccaaggcggctggttagactttgacgttgccgttgctacaccaccaatgatggctcaagtaggtcgtttaggccgtgtcttgggacctaaaggcttaatgcctaaccctaagactggtacagttacaatggacgttactaaagcagttaacgacattaaagctggtcaagtggcataccgtgttgataaagctggtatcgttcacgcaccaatcggtaaggtatcattcgatgctgctaaattagtagaaaactttaaagcgatgcaagacgtgatcatcaaagctcgtcctgcttcagctaaaggtcaatacattacaagtttatcagttagctcaacatttggccctggtgtcaaagttgacgttgctagcttctaagttggtaatgcaaaaagcgctcatccgaaaggatgagcgctttttttgttgctataattaagcattaatgtcgataatttcgaattttgtgacatccactaaacctttatctgtaatccgcaagttcgggatgacgtcgagtggcattgcgccgagcttcataatcggatcgaagtgagcggtgacgtggagtttatcgtggcaaatagcattgaaggccttttgatgttcaattaaagtgtcgatgggttcgttactcattaagccgccgatgacaaatggtaatgttgcgatgacttggccatcccgaatggcaacgccaccgccttggctttctttgagcgcttcgatggcaacgaccatgtcagcatcgttggtaccgactactacgaggttgtggctatcgtggccgatgctggtggcaatcgcaccgttcttgatgccaaagccgttaagcaggccaaccccgacattaccagtgagatgatgtcgttcaactacggccactttagcgatgtcttcgtcaggatgatattggaaatcaccgtctgcagtgtgagcgaccggtaagacgagattttgtgtccgactgatgctttgtaagccgatcacgtgggctttatcgcttgtgaggttgagttttaattggtcagcggtgaatgtatcgaggtgtacggtttgtaacaagtcatcaaaaccagtaactgaatcttcagttgttagtaagtattcgccgctagcagcaactttttgaccatcgatgaaggtttgattcacactgaattgttcgagatcatcaaccaataggaaatcggccttcaaaccaggtgcaatcccgccgcggtcagctaagccggtacattgggcagtgttgatggtggccatttggattgccatgatggggtcgatcccgtttgcgatagcaacgcggatactttcatccaagtggccggtttcacggagggttacggattgtaagtcgtcaccgcagagacaacagaaacgtgcgttttgcggcgtcacgcctttcaaaagggttggcatattcttagagacggtgccgtagcggagataaacatacataccgcgactgatgcgatcgagcatttcatcgacttgggtacattcgtgatcgttacgaataccagcagcggcatatgcgtttaagccttgttcttttaaagcgggtgaatgaccgtcgatgagtttatttgcgttgagtgaaacgagtaattcgtctaaaacgccatcatcagcattgacaacaccgggataattcatgaattcggcaaggccgtaagtgagattgcggtcgtaagaatcttggatttcagcagcggtaatcacagcaccagatgtttcgaggcttggattagcagcaggcacacacgagggcatggtgtacttgatatcaagtgctgtctttttggcagatgcgaccatgtattcaagcccccgcatgccagcgacgttcacgatttcgtgtgggtcggccaagatcgtcgttgtgccatgtggtgttacaagtgatccgaagacagcgggtgagacattggcagattcgatatgaatatgcggatcaatcaaacctggcacaacatattggccgcgtgcatcgataacttttggtgcaaggtagtcgtcgctgataccgaggaagcgaccattaccaatcgcgagtgtgccttcgataatacgaccattgtagacatcgacgatttttgcatttttaatgaccatgtcggcagcttgacggccagcagcttgatcaattagttgttttaaagttgttttatccatgagtaatctcctttatttagcaggtaattcgtgcattgtgaagagtaataataggaataagagcgcagcgacatacataatcggatgcacttttttacctttaccagcagcaatcatggtgatggggtaagtaatcagcccgaatgctaaaccgtatgagatattataggttaatgggacgcacagaataatcatgaaggctgcaaaagaagtttcgaattctgaccagtcgatgttggcaattgacttcatcatgaatgaacccacgatgattaagattggggcagtcacttgcgacgtcacaacggccagtaaaggtgagaagaataagcttaagacgaacatgatggcgacgaccacggcggtgaaaccagtccgaccaccagcagcaatcccagttgatgattcgatgtaacaagcagttggggttgaaccgaaaacggaaccggcaatcattgaggttgaatcggcgaaaagggctttgccgacttccttaggcatcttgttgcccttgatgaaaccagcttgttgagcaagtccgattaccgttccagttgtatcgaagaagacgctgaagaaaaagacgagaattacgacggccatttgaacattgaagacgttgtggatgttcatgattgagacaccgaaagtgggtgctaagcttggaattgaagcgatgatgctgtgaggcattgcgattagaccagtcacgactcccatgatggctgtggccgccaaaccgatgaataaagcgccagggactttgcgggctaatagagcaacggtgacgattaaaccgaagacggtcaaccaaacgtgcggatctgaccaactcgtaatggtgacgaatgatttagcactactgacgacgatgcccccttgttttaatccggtaaaggcgatgaataacccaatcccgacggccatggcggcttttaaattagcgggaatcgcgttaatcacgacttcgcggacttttaagaccgtgacaagcatgaaaaggagggaagcgacgaaaacaccggcaagtgctgtttgccaaggaattcccatgcctaaaacgacggaataggcgaagaaagcattgctgccgagtccgggtgcaacggcgattgggtagttggcgatgaaggccatggctaaacagccgaccactccagttaatgcggtggcgacaaagacggcccccttatctaggccggcgtcgcctaatatagttgggttgacgaataaaatgtatgacatcgcaataaaagtggtaattccggcgatgatttcggttttaatggtcgacccacttgccttaattttgaattgacgttcgaaccagttcgttcgtgattctgttgcaatatcaatatttttatccattatgcacctctgaattagtattttaagaaccttggcattattgtacaacaaaacaatcgtgtttttaagaaaaatgtgaaaaatatttattattttgtaaatatcgttcgtgatttggtgatgaaaagggtttattttatcaaaaaagagccattagcgtgaaaaacgctaatggctctctcataattcgcgattaatttagatggttgctaggacgtgattagcaatcgctaattcttcgttggttgggatcatcaagactttgatagttgaatcgggggtactgatttgacgggcacctgagccgttttcgttcaattcaagatcgatttgaacgcctaaaacagccagcttggcacagatatcagcacgtaaacgggcgtcgttttcaccgatgccggctgtgaaagtgatgacgttcgcaccaccgagttcaacgtggtagctcgcgatgaacttcacagcagaagtgatgaacatgtcgtaggcgagtttagcccgtggattggtagcgcgtgttgattgaatatcgcgcatgtcagcggaaacgcctgaaacgccgagaatccctgatttggcgttcaaaagcgtgatgacgtcatcggcactcttatccaattcgttcattaagaatgggacgatggccgcatctaatgaaccagcacgagtgcccattggaacgccttctaacggtgtgaagcccattgatgtatcgacaggcttaccattttggctggccgtaattgaagaaccgccacccaaatgaagtgtaattaattttaaatcggcaacgggttctttcaaaaagtcagctgttgcttgtaagatatagctgtgactaatgccgtgttcgccatacttgcggatttgatagtcttggctgtattcataaggtaagccataaaaactagtttcatctggcatatcgagatagaattgactatcaaagacagccacttgagggacattagttggtaaaatatgcatcaaggtttcaatgcagtcaacttgcacgggattgtgtaaaggtgcatacttgtcgagttgttttaatgtatctaagttggtgcgatcaataatggttggtttttcgaacgtggtagcaccggcaacgacccggtggccgactgcaatgatgtctgcgggtgaatgaatgatgccattgtcttcaagttgtttcaaaagtcgaagaacaccatcttcataggaaagattagcaatggcgacttgttctttttgaccttggaacttgaaggtgaagctagcttctggtgtgttcatgcgttccatgagcccgcttgccagtaaggttaaatcagattgttggaatagttgccatttcaatgatgaactacccgcgttaacgactaaaatattattcaaaaaactgcacctcttacgattaattttcttgatagtctcaattttaaaccgttttttcagaaaaataaaataagtaaaacgtaatgctaggataactaaaattaagtaccgataatgattgacgctttatggaatccatgctatatttgtagttggttatttatgctaccgaagactcaggtgccaataggcttaatatcctgccgaggaagatacgttgaaatccctctctatgtcttggtggacatggagttttttatttttataaggaactcttgaccacaagttttacaaatctaatggaggtgaatcaattgagcgaaacaatcattgcaaaaaaagcacaaattgttgacacagttgttgaaaaattcaatagtgctgtttctatcgtcgttatggattaccgtggcttaacagtagaacaagtaactgaattacgtaaacaattacgtgaagctggcgtacaaatggaagttgttaaaaacacttacttgcgtcgtgcagcagacaaagctggttacgaaggtttggatgatacattcacaggccctacagcagttgcattttctaacgaagatgttgttgcaccagctaagatcatcgctaactttgctaagagtgctgatgcacttgaaatcaaaggtggtatgatcgaaggtaaagtggcaacacttgatgaaatcaatgccttggctacattaccaagtcgcgacggtttattatcaatgttactttctgtattacaagcaccagtccgcaatgtcgcatatgctgttaaagcagttgccgacagcaaagacgaaccagctgcataatttaaaattgtgtagttaaaagtgttatcaaaaaatattacccacaaaatggaggaaacaaaaatggcattagatgtaaatgcaattgttgatcaattaaaagaatcatcaatcttagaattaaacgacttagttaaagcaatcgaagaagaattcggtgtttctgcagcagctccagtagcagcagcaggtgcagctggcgcagacgcagcagctgaaaaagacagctttactgttgaattatcagaaatcggccaagaaaaggttaaagttatcaaagccgttcgtgaaatcacaggcttaggcttgaaagatgctaagggcttagttgataacgctccttcagctcttaaagaagacgttgctaaagacgaagcagaagaaatgaaagctaaattagaagaagttggcgctgtcgttaacttgaaataatttaaatagagcgcccttggcgcttgtttagattttgagcactaacctaaaatcgggcatcgcggcgatctaagccatgatgcccgatttgtagttaagcgcagaaatctagcgccaatggcacgtttcaaaataaagtgcgtcattaacgggttgtttttgagcatttgcctaatcagccggtgatttgactgatgtagcaaagcgcagaaagcagttaatgaaagcacgttttatttctaaaagaaccccactaatgtggggttctttttttacatatttttttgtaaaacataaatggcgagttgcacaaaataacacgatgctaaatatggattccatatcttaagcgacagccattgctgttgagaactaaaaaggcaatcagaggatattgattgtcgggtgaacgggaatcggattgtgctccgggtaagtaataagcgaaaatcataatctaacagccatctaacataattgtcattttactgtgttttgccttgggatagcttataattaaattaattaagttaaggagcggttgatatgcgaaaatggggcaaacacatatatgaaggaattcagcgacacctaacgttgttaaaaggcatcttcatcctttcggtgatggtctttgttatcctagaagtcggccggattttccgggacttgaacggggaacaattgaaagcgagtttaacgacacaaagtccgtggaccttgctagcgatgctggtgattgggtttgtggcggtcttgccaatgctcaattatgatttcgtgattgcggagttgctgccggaggactattcattctggtataaagtcaaatctggttggatcgtcaatacgtttacgaacattgccggattcgggggcttcttaggtgcgagtttacgggccaatttctatggtaaaaaagcgtcacaaaaagaaatcttaattgcgatttcaaaaattgcgctgttcttattagccggcctgtcaatctggtgtctgattagtgtcgttttgatctttggctttggtattggtgggatgtatgccaactactggttatggctagtgggcggttcgttgtatttccctggtctgatgattagtacgcgctttaaaaatgcggcctttttcaaagatctttcgatgcaacgcgttttacgcctaacattagggtctttcttagaatggggttttgcgggcggctttttcttaacgattggttatttcttagagattaagggtgacttattacaagtcttaccacttttcatgattgccaacatcattggtgttatttcgatggtaccagggggcttaggaacgtttgatttgttcatgatctttggtctgagtgcagtcggcgttcaaaatgcggacgccgttgtctggttgtcattttaccgagtcttttattacatcgtgccgtttttagtcggcgttggtttatttactcacgatgcaggcagccggttaaatcattatttacagggcttacctcggcaggtgatgcaaaaaatcgctcatcacttcattgttttcttcctttatatttcaagcatcattctattattagtagcaactgtcccgaactttgcgattaccaacacagtgattggacagctctacccatacacgttcttcttcttagatcgtgtgacaaacatcattgtagcgtttgtcatgttggccttagcccgcggcgttgccaaccgcgttcaaaaagttttctggccgttgatggtgctattggtgattgcgattaccaatacactatggcgggatttctcaatcaaactcgctgtctttttaacttttgtgctcgtagctagtttcttattgaaacgcgaattataccgtgaacggatcgaattttcatggaatgatcggattgtggatggtgtacttttcgtgggcgccttcttgttatacggctttgttgggattgccaattcgccacacttacggcatcgcaaacccgtaccaacagcgcttttatttccatccgaaagagtctggttggctggttttatcgggatgttggttgccgcagggaccttatatctcgtctaccgttatctcagtcgagggggccgttcaatagcagcgccatatgatgaagcacgaattgctaacgtgattaacacttacggcggcaatgaggtcagtcatttggcatacttacgggataaatcagtttatttctatcaggaagaaggagaagatcaggtattcttgctttatcgtaaaaaagcggatcgcttaattgtaatgggtgaaccagtcggaaatccggctaaaattttaccggcaattgaacagatgatgcacgacgctgatttgattgattgtcatttagcgttctacgaaatttcaagtgaattaacgatgcaactgcatgaaatcgggtttgactttatcaagtttggtgaagaaggctacgtccgtttggcggacttcacgatgactggtaagaaacggcgggctgaacgcgccttaatgaataagtttgaacgtgaaggctatcaatttgaaattttaaacccaccatttagtgccgaattaatggcagaactcaaagcggtttctgatgattggttgggtagtcgcgttgaaaaaggcttctcgttaggctttttcgatgaagcatacctccaaaaagccccaattgcagttgtctataatgccgatcaccaattaattgctttcgctaacgaaatgccaacaggaaccaaagaagtcgcaagtattgatctaatgcgtcacagacaagacgcgccatctggtataatggatgagatctttattaatctctttgaacaaaatcgaacggatggctacacgtacttcaacctcggcatggcgcctcttgcaaatgtagggacttccgagtttagctttattgaagaacgaatcgctcatctgatctatgaatacggctatcacttctacggattccagggattacggacctataagaagaaatatacgacggaatggcgttcgaaatatatcgcttatcaaaaacggacctcattaattttcacgatggttcaagttttaatggtcgttaatcaacgggttgcggatcaaccgcatcctggtggcttgctaggtcgtttgatgaagtcagttcaaattgggaaattttcagataactaacgacaaatgaggaaaaaagatgacagagtattactattctaaaaatccagacgttgaacacgctgagcggcaatggacgtttgaattacgcggctttaattttaaatttataacggataacggggtattctctaaaagcactgttgattacggttcacgggcattgctagcagcggtcgatctgagtgaagcgccagctggtccagtgcttgatatggggtgtggatacgggccaatcgggatgacgattgctaagctcgcaccagagcgccgaatcgacatggtcgatgtgaatgaacgggcattggatttggcacgtaagaacagtgaattgaatcagattaccaacgttactgtattcgaatcagctgaatatcaaaacgtaacggatcaatacgccgccatcttcaccaacccaccaatcagagcgggaaaagatgtggtgcaaaatattttgactggtgcctatgatcacttattaccagatggtgaattgaacgttgtgatccaaaagaaacaaggtgccccatcagcgaagaaaacgatgatgagcatttttggcaacgtgcaaattattcacaaggataaggggtattacattctccaaagtattaaattaaagtaaggaccggggttgaaagcggtaaattcaggcgaattgtgctaaactatgattaaagtacaaggaggttgatacgatgaaaaccagatataaaattttaatcggcgtaggggtgactgcagcagttggcgcaacgaccgcttttgtcggttctaaggcagtaatcgataaagtatcgcgctatcgcaaacgattagcagttaaaagttttgtaaaagacaaattacatggtaatcaaaaggcgttagagttggtcgatcaactctccgatgcggatgtgaataacttgttgactgcggcagacaggttaacccaattaaaagataagctcggagaacacgcagacaatctaccagatatgatggatgatttgcgccaaacactaatggcttacgcaacaaaggtgaaagaaaaactatagagtgcgactcgagttggtcaggctttgagcattaacagtgaaatgagcattatggcagtccttgccataatgctcattttgcagttaaacggaagaggatggcttatggagcaattaaaaatggtatcgacaatccgtcggcaccatttttaattgctcgactagcgcgactgtgttttaatagttgagaagtaaaataaaggggcgactaacgcgtgagtgaaacacaacaagagatcgatcaatggatgcaagccgccatcgatgaagctaaccaagcacgcatcattggcgaggtaccgattggcgccgtgattgttaaagacggacaaattattggacgggggcataacattcgcgaacacgcgcaagatgcgacgttacatgctgaaattctcgcgattcaagaagcctgtatggttgaaaagagttggcgtctggaagataccgcgatttatgtcacgttagaaccatgcccaatgtgtgcaggcgcgattatcaatagccggattcccaaagtttattttggcgcgagtgatcctaaggctggtgtgaccggcacgttgatgaatttattaactgacaaacggttcaatcaccaagctgaagtggttggcggggtgcgagaagctgaatgtgcgagtttattgcagactttttttagaaagattcgcgaaaatcgccgtaaaaaaaagaaaatggctggtaattaatgcttgaatcaggtagaataggaattgccgaaaggccttgagacaatgatgagcctacgaatcgtgtcaggttcggaagaaagcagcactaagtttgttttatcatgtgtcttaagttttgtgaaaattaaccagacccaacggacaattaattttgtcggttgggtcttttttcatgcaacgcaatcaaaattgacggtaaaatatgctaaaatggaacaagtagttttaaatgaatcggactttaaattgcaaaggtggaggtcattaaatgagctatcaagctttataccgggtttggcgcccgcagcgtttcgatgacgtgattgggcaagaaacaatgacccaaacattgaaaaatgccattatgacgcaccaaacaagtcatgcttatttatttacaggcccacgtggaacagggaaaacatcggctgccaagatttttgccaaggcaattaactgtcattatcaaaaagatggcgaaccatgtaatgaatgtgagacatgtcgggccattacggctggcgccctcaatgatgtgattgaaattgatgcggcgtctaataatggggtcgaagagattcgtgatattcgggataaggccaaatatgcgccgacccaagctgattataaaatttacatcattgatgaagtccacatgttatccactggtgcgttcaatgcactgttgaagacgttggaagaaccaccaacaaatgtggtattcatcctcgcaacaacggaagttcacaaggtgccagcaaccatcatttcgcggacgcaacgctttaattttaagcggatcacggccgctgatttatttaagcgaatggcttatattttagatcaaaaggaaatgacctatgatccagcagctctgaaagtgattgccaaagctgctgaaggtgggatgcgggatgctttaagtattctcgatcaagtgttatcctttagcgacaatcacgtcacgttggataatgcgttggatgtgacaggcagcttaaccgaagcgttgttggcggattatgtccaaacaattcaggataatgcgcctaaacaagcgttgcaattgttgcaacagattttggctgaaggtaaagatgcccaacgttttgtggaagacttaattgaatatgtgcgcgacttactgttgtatcaacaagcacccgaattagtcgccgcaagtgaaatggatctattggatgaacacttcaaagcgctcagtgcagcgatgccggctgaccgtttgtacggggtgattgatatcctgaatgaaacgcaacagcaattgcgtttcacgaaccatccagaaatctatctggaagtcgcaacggtccgcttgacgcaagtccagacagcccaagtaacgactacgatggttgccgcaccagctgctgataatgaacaagtcgcagcgttgagtcaacaagttgcacaattacaagcggcgttacaaaaattggaagcggcgggaccagtgagtgctccagctgccaagcctgctaagaagattagtaaaaaggtcaaccgtaaggcgatttatccggtattggcagatgcgacgcggaccaatttggagaatctcaaagaagtctggccggatctgttgaatatgttggacgttaccaagcgcgccgtgatgaaggtttccgaaccggttgcagcgagtcaaagtggcgttgtcgtcgcgtttaactacgcgattttattcgagcgagctagcaatgatcaagatcttttgaacattttagaaaacggcttgaatcgtttgactggcaaccccttcaaggtggttttagtgccccacgatgtttggccagaaattcgccaggaatatttacagaatcacgcagtaccaagtcaacaggtaacaactgatgacgaagcagaagcaacgccgaaaccagaacaaaaaccggccgttgtcgaacaagcacaagctttgtttggcgatgcggtggttgttaaaaaagattaacgtttaaatttgaaaggaagtaatgaagatgcgcggaatgggtaatatgcaaggtatgatgaaacaaatgcaaaagatgcaaaaagaaatggggcaaacacaagaagccctcaacaatacagaatttgtcggcaaagcagccaacgatttagtcgtggtcacaatgactggcgacaagaagatgaaagacattgccattaaaccagaggccatcgatccagatgatgttgatatgttacaagacctcattatcatggcaactaacgaagcgatgactgaaatcgataaacaaacacaagcccaaatgggtaaatttactaaaggcctcccattttaagtgagacattaaggaagtgcattgatgcaatatccagaaccaattgcgaagctgatcgaaagctacatgaagttacctgggattgggaacaagaccgcaacccgattagctttttacacgattgatatgaatgaagacgatgtgacgaatttcgccaagaacttaatttcggcacgtcgtgatctgcattattgtagtgtctgtggcaacattacggatgaagacccgtgcgaaatttgtcgcgatacaacgcggagtcaagacatgatcttagtggttgaacaaccgaaagatgtcatgtcgatggaacggatgaatgattatcatgggctctaccatgtcttgcatggggtgttatcaccgattgaaggcaaggggcccgatgatattaacatcgccaatttgattaaacgattgcaaaaaacaccggctaaagaagttatcattgctactaatgcaacacctgaaggggaagcaacggcaatgtatatttcgcggttgattaaaccagctgggattaaagtgacgcgtttggcgcacggtttatcagtcggtagcgatattgaatacgcagatgaaatgacgttgttaaaagcggttgaagggcgtcaagaaatttaagaatggtgggtttgcgatgtttggtagaaaaaaaccgacattaaaacaattaggtgatcaagccttattggatttagtgtaccaagtcaaagataagtggcagatggcccaaaagacgcaagacaacgtccgcggactcgatgaccaattagagatggaaagtaagattcaacaagcaaagtttgaattcttattccgccaagcccgccaacgtaaagtagcaggtgaagcagtttcgaaagaagcagcaactagaaatacatttagatagcgcgggcattcagatgacagccgcagcgtgaagacaaggtcgagtgactttgtctttttttatttcaaacgtctgctgtcgcacgctaaacgcaagaacataaccgccggatacgcactcttccctttacgtcttttgttgaatcaagtaaaatggaagtaactctatggatgaagaaggttgttttgtggtaggaaaattaattacgtttgaagggccggatggtgctggtaagacaagtgcgttgatggctgttgtaccgctacttgaagccaagtgcaaccaagacatcattgttacgcgcgaaccaggtggcaatccgattgccgaaaagattcgcaatgtcattttagatgttgaaaatacggcaatggatgaccgcaccgaagcactgttatacgctgccgctcggcgacaacacattgttgaaaagattgaaccagcgttggctgataacaaaatcgtgatttgtgatcgatttgtggatagttcaatcgcttatcaaggggcaggtcgtggcatcggtgaggaagccgttgcgcaaatgaacttatttgccactaatggattagcgcccgatttaacggtataccttgatgtaccatctgaagtcggtttacaacggattaaacagaatcgacaggatcaatatgatcgattggaccaagagaagttggcttttcaccaaaaagttcggcaatcctacttacaacttgcgcaagataatccagagcggattcaaacgattgatgcgaccgcagacttagacatagttgttgccaaatgtctgcaagtgattgaacaacgatatccagacttattcacagcatagaaaaggggagattgaaatgaaattacttttagcaattgttcaagataaagatagcaacttattaagcagcgaattaatcgatgccaacattcgggcaaccaagttgtcaacgactggtggcttcttaaaatctgggaatacaacgtttatcgtcggaattgaagacgaacgggttcctgaagcgcttaagattattgaaaaaacgtgtcaggcacgcgaacaattcatgacaccgcctgttaatatggatgccacgatggatagctcaatgtcatatccgattgaagtgcaagtcggtggggcaaccgtctttgtgatgccgattgaacagttccaccgcttctaatcgatggccagtttaacaattgaacagattcaacccaaacttgtggcccagtttgcccagattatcgcgcgtggacagatggcgcatggttatctattagctggtgcacagggattggggaagacacaattggcacagtggttggcactgcgtctgttctgtcaacaagtgacaccagatgggcaaccttgtcgggcatgcccggaatgtcagcggattttgacgcataatcatccggatgtcattgaaattaagccggaaggtaagagtattaagattgccgatattcgctatttgaaacaagaagtggctaagagcgggatggaatccagtcaacgcttattcattattgaagctgctgaaacgttaaccgccagcgcggctaatagtttgttgaagttcttggaagaaccggcgcaaaatgtttacgcgattttatgtacgagtaataaaaatcaaatgctccccacgattttatcacggcttcaagtgattgatctggcagcattggcaccacaaatggtgcaacaacagtttgaagcagctggtattttgccacaacaagcgcagttattggtgcatttgacgagtgacttaactgaagcacagaccttattggcggatgattggctattacaagtcagtacgaagcttgccgcgtgggcacaaaaagttgaacaacgtgatttagaggcatttgtgcagattcagacgcaaattttaccattattagttgatcgccaacagcagaagacctttttaactttggtgggcttatggtatcaagatttattgaattaccgctatgaattaggcgccacaccttgttttggtgcgtacgaaagccagttaaaccaggccagcgccgcgttgactaccacgcagttggtcgctcagacggaatatgctttacaagcacaacgcatttttgaacaaaatattagttgccaaaacgtcttagagagtttaacgttaaagttaattgcatagtaaaacgcataaccagcgtatcgggaggatatcaacggtgagtaaagacttatatgaacagttatcagacattgaacagcaagctaaattgacgtttgaggggctcagtgaaatgaaagcagtccttgccgaagtccttgagaaaaacgctgaattaaagattgaaaacaagtacttgcgggaacatttgcaagaattggaaccatcagccaccccgcaaacgggtaaggaaggggctcaagccctttcgaaatcaaaacaaaacttacagaatctttacgaagaaggcttccatatctgcccgtatttttatgggtcacgacgcgaaaataacgagccttgcgcattttgtaatgatgtcatctacggcgaacgaacaaacgattaaaaaaggcagggcaaaagggatgcttacttttggcctgtctttatgtcattattgatgcatcttgaaaggatagaacatgcaaacacaatcaagttttaaaacgacggaaacgggaactttatttttagtaccaacccccatcgggaacttaggcgatatgacttaccgggcaatcgatacattgaaatcggtcgcactgattgctgctgaagatacacgaaatacgcagaagttattgaaccactttgagattgaaacgaaacaaattagtttccacgaacacaatacgcaacaacggattgaaacgctgattgaaaaattagaagccggtgacgatattgcgcaagttagtgatgcggggatgccatcgattagtgatcccggtcatgagctcgttaaagcttgtattgaagcgggcatttcagtggtgccattacctggagccaatgccgggattacagcgttgattgcttcgggcatcacaccacaaccgtttacgttctacggttttttgcctcgtaaaggcaaggagttaacggaagccgtaacgacgttggcacaaaagcctgaagcacttatcttctatgaagcaccgcatcgtttgaaaaagacgttgcaagctttgctcagtacgtttggcgccgaccgcaaagtcaccttggggcgcgaactcacgaagaagttcgaagaattcattcgtggcgacctagaagaagtgcttgcttgggcgactgaaacagaattacgtggtgaatttgtgatgatagttgctggaaatccagcaccagatgcaacggtcagtgcagttgcaacggaatcgctatcccttcctgaacaagtggaagcccagattcaacaaggagcaagccccaacgtggcgattaagacggccgctaaggcaaatggcttgaaaaagcaagtcgtttataatgcctaccacgaattaacagaatagaggtcacgccatgccaggaaagcaatattcagaaaactatcaaattccgtatttcgaaacggatatcaagggcgaattaacgcttgcatccttggtgaacattttaattttagcatcagagcatcaactcaatgcgctcaacgtcggtgaagcgacaatgcatgcgctcaatcttggttgggtggtcacgcagtatcaaatgaagattacgcggatgccgaaggtggatgaaaaagttaaaattgtgactgaagctgagagttacaacaagtatttctgttaccggaatttctggttatatgatgaagccggcaacgaatgcgtcttcgtccaaagcatcttcgtgatgatgtcgtatgaaacacggagtatggtgcaagttgtgccggaaatcatggcaccattcgagtcaagtgagattaaaggtagcaaacgattcccacggattaagaagattgatcccgaacaagtgacgaccaaagaatatcgtgtgcgttatttcgatattgatggtaatcaacacgttaataacgtccattattttgaatggatgttggatgcgctcgattatgacttcttgacgacacaccgcgtagcaagtgtcaacatccgctacggccacgaaattcaatacggtgaaatgacccaaagcatggtcgaacaactcacagttgatgatataatcacaacacggcataaagtcgccgtggatgacctaagtgcagcagaagcggaaattacgtggaaagagcgctgagtcgaacgggtttgctttgaggattaacgggataattgggattatggcgggtcttagccataatcccaattattcagttaaccggaaaaggcagttcgaggaagcacgtttaaacgaaagaaagccccattcacagataaagttgtgatgggctttcttttgttatcttcgaatatttattgaaacgtgctttttgaaacagctccctgcgcttaacccaatttaccaaatcggcgatttcatcgccaattcggcaaatccagttaatgctcagaagctaaccgtttcaaacgcactctatcgaaaacgtgttttcatcaacagcttcctgcgctttgctacacttatcaaatcggcgcttacagcgtcaattcgctaagttaggcaagtgctcagaagctaaccgttgatgacgcactctatgatgttgcgttgctgacaaattcttttaatgctgcgcttgttttgcctgcgctgaggccgacttgtagtttgaggcgtgcttttggtccattgaggccttggcagaaggtgacgcccatttgtttaagctttacaccgccgccttggtaatcgtagacgtcttcggcaatcccgttgaaacagcgagaaacaagtacgatggggatgttgcgatctaatagcgcttgaacagcgggtaaggttgctggtggtaagttaccagccccgagtgcttcgataacgagccctttggtgttgggttggttgatggcgtcgaataaagtcccatccatgccagcgtatgcttttaaaagataaacaggttcgacaagggttttgatgtcgcaaatttcagaacgaattaattcttggaagaaattcgcattgtgtttgctgaccaaaccgatgggaccaaaagttggcgttctaaaggttgcgacgttcgtcgtgtgcgtcttcgtgacataccgtgctgtgtgaatctcatcgttcatcacgactagcacacctttatcatgagcatcgtcagaagcggctgtccaaacggcactaatcaagttgtgtaatccgtctgcgccgatttcattcgacgagcgcatcgcaccagtcacgacgacggggatattgttgggaagtgtcaagtctaagaaataggcggtctcttcgagggtatccgtcccgtgtgtgacaacaacaccatcaatcccgtcttcttcagcttgttgaattcgattcttaaggtttaacatcacagcgggtgtgatgtgtggtgaaggcagattggcgaactcttcactttcaatgattaattgattatcgaacagcttttcaaagccggccattggattttgatctgtgggtgcaaccgcgccatcttcgtccgcagacattgcgattgtgccaccagtatggaggactaaaattttcttcatgtttaatgaacacctttctttaaatccgaattactcatctgtaagtatagcaaattttctgcaagagttgctgaaaaatgaaaatcaattgcttgtaattaaataacgttagtgatacatttaaggggttctaaaaattcggagtaggactgaagcgttaagtgctggtggaacggaatgtggacaccagacgaaaagcagcaatgcttgcgatttcagtaccgcattcgccgcagtattatttgtggcagctccaaaagggagatgctttttatggttaatggtcagatttttggtgttaagctagacactagacgcgttgttttactagctgttttaattgctttacaattggtggttgcacgctttgcaatttcactaacgattttcagaattagttttggattcatcgtcaccgccttaatggggtggtggtttggcccagtttgggcgggacttgccgccgttattggcgacctcatcaatagtttgatgattggggtcccaggtggttatttcccaggcttcacactttcagcgtttctaggggctttcatctatgggtgttacttctaccgacaaaagattacatggtggcgcgtgattgccgccgttgtgacagttgtgctaatcgttaacctcggtttgaattcatggtgggtgtcgattattagtcatacaccatttgggttccactttacggcgcgggccattggggaagctgccacattagtgattcatccgattattctatacatcgtgatgcatttcgaaccgattattagattaaaagatagagtattataaatgagtaggtgttatctatttgaagataacgcctttttttgtggaaaccggctttttatgctagaataacaaggattataagcagaagaaggatgaaataatgaagctattggcaatggatacctcgaatcaagcggtgagtgtggcactccttgaagatcatcaaattttaggcgaaatgactgttaatattcgtcaaacacatagtcagacgttacttccaatgattgatcaactattaaaacaaacaaaaaccaccattgaagatatcgatcgctttgtcgttgcagaaggtccgggttcatacacgggattgcggattgcggtgacaacggctaagtcttttgcttggacgcttaataagtcattggtcgggatttcgagtttagcattgctagcggccaatgtgatggatacgaccgccttgattgtaccgctgtttgatgcacgccgcgacaatgttttcgcggggatttatcagtggcaaaatgggacattgcaaaccgttgtggccgatcaacacgtttcactagaagcactactggcacaattacaattattggcagaacctgtttattttgtggggaatgacgttgcacactttaacgaacagattcaagctgcattaggtagtaacgcgcatttcgtgtccgccaaccataatttaccgcacgccagcgtcttgggtgaattaggcttgatggctgaacctgtcgcggatatccatggcttcggacccgtttatttacgcaagacggaagcagaagttaactgggcaaaaacgcatgatgagcgaggcgctgattcgtatgtggaacaagtttagggaatacctcaaaccccagatttgggtcaagaaagaaatgccttacacaactcggcgcgttgaaattgatgagacgacattttacttagcacgcgcgagtcaaaatgatattacggcattgttggacattgaacggtcggtctatgccggtcagacgccgtgggatcgttggaccttcactagtgagttgagcaagcgcaagacatcgttgtatctggttttatgccaagggactgaagtcgtagcgtttgtcggtgcatggttttcaaccaatgaagctcatattacgaatatcgcggtgcggccaagttatcaaaaacgtggtattggccactttttggtgcacgaaatggttagtttagcccacgattatcccagtcaaaaaattacactagaagtacgcgccagcaacacaagcgctcaagccgtttatcagcgattgggttttacagtggtgcggacgcgtcccaattattacattcaggaaaaagaagatgcattcagtatgtgtcggatattgagtcaataggagtcagtcatgtcggaaaaacgagaattaattttagcatttgaatccagttgtgatgaaacgagtgtggccgtcatcgaagacggtcatgttattttaagcaacatcattgctacccaaattaagagtcatcaacgttttggtggggtggtacccgaagtggccagtcgccatcacgttgaacaaatcacagtttgtacaaaagcggctttagaagaggccggggttacttacgctgatttaacggcggtcgcagtcacttatgggcctggattagtcggcgccttattaattggcgtgacagctgccaaagcgattgcttacgcacaccacttaccattgattccagtcaatcatatggcggggcatatttatgcggcgcggtttgttaagcctttagaatacccattgttagctttactggtttcaggtggccatactgaattggtgtacatgccagccgccggcgaattcgaaattatcggtgatacacgggatgacgcagcaggtgaagcctacgataaaattggtcgcgtcctcgggattcaatacccagccggtaaagaaatcgatcggcttgcccacttaggtcaagatacatttaaattcccgcgtgcgatgctcaaggaagataatcttgacttcagctttagtggtttgaagagtgccttcattaacacagtgcaccatgccgatcaaatcggtgagacgctgaaccacgaagacttagccgctagtttccaagcgagtgtggtcgaagtgctcaccactaaaacgatgcacgccgcgcgtcaattaaacgtgcgccaactcgttgtggccggtggggtggctgccaatcaaggtttacgtgaaggtttggcgacagccattaaggcatccggaatggatttagacctcatcatgccaccacttcgattatgcggcgataacggcgccatgatcggggccgcagcgcatatcgaattacaaaaacaacaatttgctgatctaagtttaaatgcagtccctggtttggattttccatacggtgcataaaatacgaattcaaaaagcctgtcgataatttcgacaggcttttttgcttaaatggattgcttagttgattgtaaggtagtatagatgtccgtcggcagtgccactatcaacggactgagctgatccacgccaatcagtgttaaatcgtgcatagcacgtgtgacgagtgtgtagaggagatctacgtctgattgtgcgccgaaggtcttcttagagatgtcgtagccaatcacagcgtcgaactcgagccctttggctaagtataatggaaggattaggatgcctttgggtaaactacgggttgtttcaccgatgagtgtgacgtgttcatcaggtgttaaactagcgtagagttggtgggcaacttgttggttcttggtgaggatcgcaacggtcgcgtgttctgcctggagatggcggatttcttgggtcagtgtagcgagcgcttggtcgtttggcgtctcaatgacgcgcggtaggcgcccgtcacggctgaaggcttggagggctgtttcttttggcaagagtgccttggcgaagttggtgattggggcggtcgcgcggtaactcttggttaagctaatttggttgatttttaagcggggaaaagcagcggtcagttgatcgatgaagtggccggtttggtaggtcgccgtgaagacatcctgtgcgtaatcgccgagcacggttaatttcgcgttgggaaaggcgtggtggatgtagacgaactgagcgatgctgtaatcctgcatttcatcgatgaagaggtactgaatgccgtgattttggccgctgtcagttaataagtcgcgcaggtatagaattggggcggcgtcactgagcccgacgatgtggcgttcattgttatccgcgacttggcgaatcatggcgtcccaaaccttcgtagggatgtcggcagggcaagcaccacttaagaagtgttgatattctgtggattcatctaggaaataatcattgtagattgattcatagagtggggcgaaataactttgaacgatttcacgagcgatgaaagcttgttcatcatcgccagaatcgaattcgcggtcaccgacaatcgtccggtaagcatcatcggttaaggtatcgattttttcagcgacccagtcgagatgaacttcgaggttgatttggcgtttaagccgtttgatgagcgtgtttttagtggcgaggaatttgtcgccgggtaacatatttgcggggagcgcgagataaatctgattcatctggtctttagtaaaaaatgggcggtcttcgaagtatagatcgttgaatgccaacggttgggttgaggcttgtttaacgtaagcttcaattgcgtgcatgaacgctgcgctttctttataccggcgcatggcttgtgtcatttcaggaaaactggcttgatctttttcgaagcggtcgaagaggttctcaacctgtaagcctgagaagcgatgacttaagaactcggccatcgtcacttggcgcatgtttttctcgcctaaactaggcaggacttctgaaatataatggctgaataaacggttgggtgagaagagcaccatttggtcggcttcgagctgactgcggctgtgatagagtaaaaaggcgatgcgttgcaagacagctgaggttttaccactaccggcgaccccttggacaatcagtaagtcagcggttgtatcgcgaatgatatcattttgttctttttgaatcgtggcaacgatgttttgcatgtattcgtcactttgttcaccgaggacggcttgtaagagttcatcgccgacagtttcgttcgtatcaaagacgtgttcgatttgaccgttttgaatcttgaattggcgtttgagtttgaggtcaactttgacagggccatttggcgtctcataagtcactggaccgagtgtcccattatagtagatactcgaaacaggggcgcgccagtcgtagattaagaaattgtcttggtcgtcgataaaagtggcggtcccgatgtagagtgattccgtttcaccatcttcggtgatgtcaatccgaccgaagtaaggggagttgacgagatcggtcaggcgttcttgttggctagtcagtaatttttcgttttcgacagcggcggcgaccaattgcttttgttgttggaccgcggcgttggtttccatgcggtcatcgacttcggtgatgttgactttcgtattgtcgccgtaacgttgttcgatgtctttggtttcattgtaggcgttggccaattgttggttaatcactgtgaggcgttggtcgacctgtataactgtgcggtcaacgcgcgcttgttcttgttgttttgtgtcttcgtgtaacatagcagcctccaattgttagttgttatattataagcgtcttggggtaaaaaagcgaccgattgacattcattttaaaatccgttagtatgacagtaattcaacagacaaagtgaaggataagtagcaactgatattttcttgaacaggaagcggcgggactgagaagtcgtcaagaagttggttgtgaattgggccttcaatcgggaattagtgagtaactaattcgggtagcacccttatcgcgtgagtggcacggatgattttcgtgcaatttaggtggtaccacgtagaagcgtcctaattgtttaatcacaattagggcgctttttttgagttgataaatcaaattggagggtattattatgaacaaaaaaattatcttaaccggcgatcgaccaaccggtaaattacacattgggcattacattggttcattacgcaaccgggtagcgatgcaagattcaggcgaatacgaaacatttatcatgattgccgatcaacaagctttaaccgataatgcgcgtgatcctgaaaaaatccggaacagtctcttccaagtggctttggattatttatcagttgggattgatcccgctaaaacaaccgtcttcgtgcaatcacaaattcctgctttgagtgaattaacgatgcattatttgaaccttgtgacggtttcgcgtttacaacgcaatccaaccgttaaagctgaaatccaacaaaagaattttgaacaaagtattccagcgggctttttaatttatccagtcagccaagctgctgatatcacggcgttcaaagcaacgacagttcctgttggtgatgatcaagaaccaatgttggaacaaacccgtgaaatcgtacggacgtttaacaacgtttacggacaagaaattttagttgaaccagaaggggtcttcccaccaaaaggcgaaggacgcctacctggtttagatgggaacgccaagatgagtaagtcattaggcaatgcgatttacctatcagacgatgcccaaacgcttgaaaagaaagtgatgtcaatgtacactgatccattgcatattaaagtaaccgatcctggtcacattgaaggcaacacagtctttacctatttagatgccttcgatgatgatcgtgaaaaagtggctgaactcaaagcgcaatatcaagctggtggtttgggtgatgtgaagatcaaacgttacttgaacgaagtcttacaagcgaagttcgcacccattcgtgaacgtcgtgctgaatttgaaaagaatccagaagccgtttataagatgttagaagaaggtagcaagaaggccaatgctgttgcagaacaaacccttaaagaagtgcgggatgcaatggggattaattactttaactaatcctattcaaattaaaaaaacagttaaacaagtcgctgaatgacttgtttaactgtttttttatagactaatatagtgggataatagatgctttttgatggtactttaaagttgaatatgagagacttaattcaatttaagacagatgtaaacgctgtttttggtgtataatttgagaagttatcaacatggagcaaaggagaattgatatgcatgatttaactaaaggtaatccgttgaaattaattatcttatttaccggcccattattgattgggaatatttttcagcaactctatagtgtcatcgataccttaatcgttgggcggacaattggtgttaatgcgttagcagcagttggctcaacgggtggattgaacatgctgattatcggtttttgtacagggaccacggctgggttgtccatcttgacagcccaacgctatggtgctcaagactatcgcggcgttaagcgcagctttgcgacgagcattctgattagtttggtgataaccatcattttgacagttattagtctattatttgctcgacatattttggtcatgatgaagacgccggccagcatcattgttgatgctcaacggtttattatgattatctttggtgggatttttgcctcgatggcgtttaacttactttcgaatatcattcgcgcacttggggatagtcgaacccccctctttttcttagtaattggggtcattgtgaatattgtgttagattttatttttattttaggctttcatatgggcgttgaaggggccgggtttgcgacggtctctgcacaaataattgcggctgtgttatgcttactatatatttatcgccgcattccggtcctcgttttacggccgaaggattttcgcgtgacgcgcaaagatgtcatggatcatctcaaggttggattaccgatgggctttcaatcgtcaattattgcaattggctcaatcgtgatccaaatcatgttgaatacattgggtgctagcgcggttgctgcttacacagcggctgggaagattgatcaattagcaactcaagttgggaattcatttgggattaccttggcgacatattccgcacaaaattacggtgcacgtgaatttggacgaatcagtaaaggggtccgccagacactaatggtgtcaatcatctttagtttagtgatgggcgcgttgatcattgcctttggacgaccactggttaacctgtttatcgggaacaatcaaccgcacgtgacggatttagcacaaatctacttccgctttaacagtagttgttactttattttggcaatcttatttgccattcgctataccttgcaaggtttggggcagagctttattccaaccttagcggggattgcggagttgttcatgcggatttttgccgggatcttcctcgtgcagcaattcggcttcatgggcgcaagtttagccaacccactcgcttggattggttcatgtttggtgctattgagttcctatttcaagacaatgcaccaactgaagcgtcgtgaagcaggtaagaatagggaggaacaggatgtttaaaaagtatttattggtcggcttatcgttgaccatgttggcgttgggtggctgtcaggcgacacaatctagtcaaccaacgcacgagaatgcaccaacaattgcaaataaaaaacaagttaaaaaaacaacggcaatcttggctgagaagacctttaagtcaggcgacaatgcctatttagaagtgaaccataataaatcaacgttggatgtccgtcaatggcaaaccgaacggatcaagtatggtgcgttggatggtttaaatcggacaacgactaatacggctttcttatcgaaagagacgttaggccgttcaaacacacgccatcgtcaaacgtggcaaccaaccggctggcataatcaacccgtgatgattgatggccaacgggtctttcctgaaagtcgcggccatttgattgcatacgcgacttcgtttaatttcaaccgagatggtgttttccaaaaaggggaactcggcagtagcaataatccgaagaacttagcaacacaaacggtcttcagcaatcaacgtaccatgcagatttttgaagaccaggttcgccaagcactaacgcaaaataaaaaggtgatttaccaagtgacaactgtgttccgtggagatgaattgatgccccgcggttactgggttcaagcaatctcaacagataagaagttgaactttaatgcgtatgtttggaatgtacaacctaagatgcaatttgactatgcaaccggtcgcggccattacgatggatcgatggcggtggtggatcagtatgcaggcaatccttatcagaattaagtagaaccaaaaaaagcgccgtctcaagattaattgagacggcgctttttttgcttaatgcacaattactacttacttagaaactaaccgttttaaacgtactttaaacatgcttcgatagccataaccttccggttcactacacaacaaaaatcatggccggaaaccaccataattcctggtgataggttaatcttcaagtgataaacggctatctcagcactttatggcaggtcattgcctgctgccaagtataggtcgtaccattctcttctggtgagggtgactttgtctgcttcgcagatttgtgctaggcggccggggttcattgtgccgacaacgacttgcatgctggctggaattctgaggagccatgcgctagcaattgcgttgacgttggtgtcatgtgccttggcaactgattggagtgctgcgtttaattctggaaatttcggattatcgatgaagaccccttcaaacatgccgtattgataaggactccatgcttgaatggtcatattcgtgaggcgtgagtattctaataaaccaccatcgtgatgaatgctgcgcgcgtcttgcatattggtatgcacgccggcatcaatcataccagtgtgcatcaaactgaattggagttgattagcaatcaatgcttgcggcactgcttgttggagtaagtcgacttgaccgggattgaagttgctgaccccgaattggcggactttaccactattttgcaattttaagaaggcttcagcgatttcatccggttccatgagtggatcaggtcggtggagcagtaaggtgtcaacatgatcaagttgtaatcggttgaggctggcttcaacaccttcgatgatgtgttcctttgaaaagtcgtacatttttttgccaatgccgactttggtttgaacgagcacttgatcacggtcaatatgactggccttaagggcgttcccgaatttaatttcggaagcaccatcgccgtaaatatcagcgttatcaaagtaattaatcccatgttcataggcggtttcgagcattgtcagggcttcttggtcgctcagttgtgggatgcgcatgacaccccagacaattggcgaagccattaagccgctgccaccaacattgattttttgcactatcaatcactccttttatttgatgcttttaacctaccacaaagtaccattaatgaaaagaaaaggctttcctgaatttcaggtcgtcactggcgacaattttcggtatactaatcacaatagacaggagacagttagatgacagataagaaagcacaggcaccgcggctaaatccacaacttgagacggtacagcttactgcgtttgaaccagatgagacttatgaaggtttgtttttcgaagaactaacgttgaagcaaaccgaagttgagatgttattctttaaaggctgtttatttaaaaattgtcagtttgaacaagtcgactttaataactgtgattttcaagatgtgcaattcgaacactgcgcgttgttaaactgttcgttgacgaatgatcccttccaacgagtcgcgtttaatggttgccagttgattggttccgattttgcagaggctggtctgaatgatgtcacgttcgacacttgccaagcggattacaccggctttaactttgcgcggatgcggcatgtcgactttaaagattgcagtatgcaagaagtctcactcgggcaagttgattggcagtggctaacaatggtcgggaatcgtttgaacggcatggatatgactggcacgaatttgaagaatctcgatatcagtcagaatcaattcgaaaaagcgactttcacgctcgaattattacgtggggcgaccatcagcacagaacagacgctcgtgattatgagcgcgttgcgaattaacgtccgctagcttgccggtttttaaaggcaattatcagacaactgattgttgcgatgagcatcacaagcacagcgaagaaatcttggtgcaacagctggcagaggccgctgatacataaagcgatgaataaaataagtgggattttaaggttggctttcatgggtcattacctcggcgtttaattggaaaaggcagcgacaaaatattgtggctgccttttcgtttgatttttaataattaatcttgtatgtcaattcaacaaaatgaccgatttgacggctattgataagttccaatggcatatcggttaagtgcgtgctgaccagtgaaatgccgtcacccaggagaactggcgcaatggtgatgatgagttcatcgactaactgggctttaagcaattcggtaaagatttctgcaccacccacaagccagatattgccgccatcttctttttttaattgacgcatgaactcaggaatattcccagcaacgacatgtgttcgatcttctgtatcatgtaacgttttcgagaagacatagccgtttttatcttggtaaggataggtgccggctaatttaagactttgttcatatgtcttacgccccatcacaacggtatcgacggtgcgttggaaagcttgaattgcagcgtctgattcggatgaatcgagtgcagctaaccaaacagtgctaccatctttttcagcgatgaagccatctagactctgagcaaggtataaaattacttttcgcgaatttggttctgtcatagtcaacacgtcctttaaattaagattacctttattataacagttttaaccgctttcatacattctaaaccgttggtaatttaactggatttggcttatcatgaaaagcaaagctgtttactcaaaggagaccaaaaatgacaactactgaattttctccagaaatccaaagtttaattgaccaagttcaaaagaattatcctcaacccattaagatccgggtcgcagacgcagcgtctgggatgttaaaacatgatcaggcacaacgcgttttaaataacgatggcagcttggcaatcttaattaccgatgcgacagcggccgattatgctttatcacatgaattattacacttactattattatcaatcggttttccacaaatcatgaccgatgtcaccacgcaggatgcgcaactcgatgaacaattggttgcgaccggcacaactttgtacaatgccgctgtgcacatggtgattcaaaaagaacaagaatcccatggctttgtggatgttgaaactaaacaagcctaccttgaaggtctacgagataatctgaccccggaaaaagacgatcccgaaaatagatgggtgattttccgcgtattaacgctgttagatgccctcgtcttctttgatggtggcaaccaacaactgttaaaacagtggacggctgattatccgattgcgtttgcccaagccgaaattctctatcatgtgttggcacgcaaaacaattgattcaccattcacattacggcgggctgtgattaacttgtgggttgcgtttgatcgcgtgttatcaaccctaggatttgctgaaacgaacctccaacaactcttgacattgacgccggtattaagtgaacggcaactacgattagaagtgcgccaagtctacgatattttacattccgaaaatctatttgcgaccgcaacgaaccaaaaagcgtatgttggaattggtaagagtgatcaacaaaatgcttttgtcttagggattccagaagacaaggcaacaccggaatatttcaaacgattgtatgatttatcagtgcaaaccttcttagatgaaattggaatgccgtattcattaagaaaatgagtgcgttcaagctggtcaacttttgagcattagcacagggaagcgaattagcgacgcagtcgatgatttgattcacagtgctaagcacagaaagttagcttgaaaagcacgttaaagaacagagtgcgttaattcgcggttagcttttgagcacttgcctaatcagacggataagcgccaaaggcgattggccgaccgatgtagcaaagcgcagaaagctgcgaattaaaagcacgttaaaaaggagtgatggtgatgacttttaaatcaatgttgcatgcggcacagcatgttgttttcttgacgggtgcgggcgtgtcaacggcttctggcattccagattatcgatcgaaaacggggttgtatcatcagcaagccaatccagaatatttattaagtcacacgaatttaatcactaatccagccagtttttatgaatttgtcacgcagcagatgtattttcctgaagcaaaccccaatgtcattcaccaagtgatggcgacgattgcgaatcaaaaggggcagattatcacccaaaatgttgatgggttgcacacaaaagcaggcgcgcgggatgtgattgaatttcatggtagtttataccgtgtcagctgccaaaagtgtagccaagcagtgccttatcaggcctatttaaaggatatgcatcatcaagattgtggtgggattttgcgaccaaatatcgttttatatgaagaaccgattgatccgacggtgattgaacggtcgattcaggcgattgaagcggcggatttaattgtcgtggtcgggacgtcatttcgtgtgtacccatttgcaagtttaattgaatatcgccgtccagatgcccaattagtagcgattaatcaagaggcattacaatttgaaatgccagtcactatgatacaagcggatgcgacaaccgtttttgccgcactagcaactaaggagtgagcccatgttaactgaacactatcaaaaaatagatgcaattgatgcccaattggcggctttatttgaagaacgcatgcaagtcaccaagcaaattgcgacaatcaagcatgaacaaaaaatcggcttgacggacatccaacgcgaaaaagcggtgatggatgcgcaccttgctgcggttaaagatccagcactcgcagattacgtaagggatttataccaaacgttaattttaatttcgaaacaatatcaagtaaaattgatgaaggcgatgaaagaagcagaagaaaaataatgtggaaagagcgaaacggagacggagcgctcttttttgattgaaacgtgccgagtctgccatatctttccggttagctacgtatcgcaaacgatcgacttcgtcgctcattcacgatgcgctgctaatcctcaagatataaccggcagattcagcactctaatttgaaacgtgccgattcgaactgccttttccggttaacctaaaaatggcaatcatggctgaagagcgccataatccccatttttttgttaatcctcaaagccaacccgttcgactcagacactctaaacgtgccgagtctgctatatctttccggttagctatgtatcgcaaacaatcgacttcgtcgctcattcacgatgcgctgctaatcctcaagatataaccggcagattcagcactctgatttgaaacgtgccgattcgaactgccttttccggttaacctaaaaatggcaatcatggctgaagggcgccataatccctattttttgttaatcctcaaagccaacccgtttgactcagacactctaaacgtgcttcctgtcgcagtaatttccgcttaatctaaaaatggtattaatcctaaacccctggattaataccatttttgaattaatgctcaattactaaccgcgacagtcagcactcttttgcttaatatgctaaaatgaaactaatttatgagatgtgaggctattgaactgtgactaaacgacgctataatttagcggtaattcgctatcgcgggactttactattattgaatcggattaagcccccatttgctgggctttggaatggcattggtggcaaaacagaacccgatgagacaccaatcagtggtatgcaacgggagttatttgaagaaacgggtttacaaaccaaccaatacacactccaaaatgcggggtggattgattggcacatcgatggtgaaccgattgcaccgattgacatttttttagtcgatattttaccaacggtgcaactaccactttatccggtcggaatgcgcgaaggcgtgcttcaattatttgaaccagaatgggcacaagctactgataatcaaggaattgtggcagacttacaggccattttaccaactgttttaagcggtcagctcaatcggtatgacacggattttcatgcagatcagatgattttctttgaagcaattcccattactgaaccaagagaaggagaggaagcactatgatgacaaaggaccaaacgatgatggtcttgatggttttaaagaagaagttgcaagggattcgtttttttagagtcgtcgaagaactgttctcgttatacattatttttaaattcttaactgcaacgggcaaggtacagcttttaggggtggcgttttctgaggggcgcgccattagcttaatgttgctgctgctagtcatcgactttagcctatcgcggattcggttaaattataaacgcatgggacaacaattaattgtcacattgaaggatttaacggaacaagaagctttgttcattcaacaattccaacggttctagaggtgtggatatgataacaattggattaactacttggtcagaacatcagtcattaatgcccagcaaaaagcagttaacattaaacgactacgcgcaatttctgccagtggtggaggtcgatagtttttattacggcttacgcgcaccaaccgtcagcgcaaactggttgacgcaagtaccagccagttttcagttcattgttaaagcacaccaagcaatgacccgccaagaagactacgccgagtttacgagtactgaaaaagaattgtttgtgcggtatcgccaatcaattgaaccgctaattaaggccggccaattacaggcggtcttatttcagtttccgccattttttcaactgaatcaggaaaatagtcaatatttacgacaaattcgcgcgtggttaccggatgtgccaattgctgtcgaattccggcatcaatcctggtacgatgacgcttttaagcaacagatgtacgcctttttgaagcagctaaacatgacacacgtcatcacagacgaagcacaaacaccgacgaacagtgtgccgtttgaaccggttgtcaccaatccggcgtttgcgatgttgcgcctgcatggtcgtaatatggccgggtggcagaatccgggtgcccaatggcggaagcaacgaacattgtatcgctatgatcaagatgaattacaattttttgcggatgctgtgcggcagattaaaaatcaagcggaacaagttgccgtgatttttaacaataattctggtggggatgctgcggataatgctttgcaattacaacaattacttgggctagaatttcctgatttagccccgaaagcgcctgaacagattgatttattttaatgaaggcttagtgtgagttgtcgtttaaatgactgctcttttgtgctatactttgattacttatatggcattatttaagcaagtcgagaattgttaagattctcgtttttttaattaaggagcgaacctaatggcagagacaaaaccaacattttacgtaacgaccccaatctattatccatctggtaaattaacgattggtaactcatatacaacaatcgccgccgatgtcatcgcgcgttataaacgcttgatgggctttgatgtcttcttcttgacggggacggacgaacacggcttgaaactcgaacaaaaagcagctgaaaagcatttagccccacaagaatatgttgatggcatggctaaagacatcaaggcattatggcaaactcttgaaatttcaaatgacaaatttattcggacaacggatgaataccatgtcaaagcggttcaaaaaatcttcgacaagttattagcgcaaggcgatatctatcttggtaaatacgaaggttggtattctgtttctgatgaagaatacttcactgaatcacaattagcagaagtttataaagacgacgatggcaatgtgatcggtgggaaagccccatctggtcatgaagttcaacgggtcgctgaagaaacttacaagtttaagatgagcaagtatgctgatcgcttattggcttattatgaagaacacccagatttcatcgaaccggcgtcacggcgtaatgaaatgatcaataacttcatcaaacctggtttggaagacttatcggtttctcgaatctcatttgactggggaattcacgtttcaagtaatccgaagcacgtggtttacgtgtggttagatgcgttatcaaactatatcacagcgcttgggtacggttcagacaacgacgaattgtttaataaatactggcctgctgatgtgcatctagttgggaaagaaatcgtacgattccatacaatttattggccaatcttcttgatggctctagacttgccattaccaaaacaaatttttggtcatggttggttgttgatgaaagacggtaaaatgtctaaatcaaaaggcaacgtagtttatcctgaaatgttagtggaacgttatggtctagatgctttacgttactatttaatgcgcgcgattccatttggtaatgatgggacatttacaccggaagactttgtcagccggattaactacgatcttgccaacgatttaggcaacttattgaaccggaccgttgcaatgattaacaagtatgataatggggcagtgccagcgtatcaagctgacgtgacaccatttgatgcagacttacaaaagacagctacagaaacaatcgaacaatataccagcttaatggatcaattgaagttctctgatgccttagataccgtttggcaattaatcagccgggcgaataagtacatcgatgaaacagaaccatgggtcttggcaaaagatgacagccgcaaagcggaactcgatagtgtcttagcacacttggctgagagtttacggattgttgcgctcttattacaacctgtgatgacgcatgcaccacgcgatatgtttgcacaattagggcttgatttcgatcaagttgcgcaacgtgaattggtttatgggacattcccagccaatattcaagtggttgctaaagggaccccaatcttcccacgtttagacttggatgaagaagtcgcatatattaaggatcaaatgggtcaagcgcaaaaagcgggcttagtgaacgaaaaagtgaaggctaagcaacaagcagctgaagccaaagctgaattcgatccaaaagcaacaacattagtcagtgaaaaggacgccatcaagtttgaagatttcgatcaaaccgaaattcgcgttgctgaaattaaggcagttgccaaggttgaaggcgctgataaactattgaaattccgtctagatgctggggatcaaggtgatcgccaaatcgtttccggcattgctgaattctatccagactatgaagcgttagtcggtaagaaagtcttagccgtcacgaacttgaaaccacgtaaattgcgtggcgaattgagccaagggatgttgttatcagcagaacatgacggacaagttgaattagcagttgtgccaaacaacttggtgaacggctcacaaatcggttaatttaaaataacagaaacgtcaaaagggctaaaaggcatttacattctgtaggccttttagcctttttaatggaaaagagtgtgttgccagtggttagcttttgagcatttgtctaacttggcgaattggcgatggaatcgccggtttgaaagtgtaacaaagcgcagaaagctactggcaagagcacgttttaactgtcagaatgaggacactaaaaggagattgaaatgcaaatttttgattcacatacgcatttgaatgataccccatatgcagggcaagaagctgattttatcgcgcaagccgctgaactcggtgttgttgaaatggcgattgttggttcagatacagtattaaatgagggcgctttgcgcttagcagcgcaatatgaacctttatcagccattatcggttggcaccctgaatcagccaaagattatcacaaggcagaagaaaccgtgctgattgaccaattacaacgaccagaagtagtggcgctaggtgaaattggtttggattatcattgggatacttcgccacgcgatgtgcaacaaaccgtttttgcacggcaaatcgagattgctaaatccttgcatataccaatttcagtgcacacgcgggacgcgttagaagatacgtacaagattctaaaagaaacagatgtccgtgattgtggggggattatccacagttttaatggcgatgttgaatggatgaagcggtttatggatcttggcatgcagatttcgttcagcggtgtggtcagttttaaaaatgcgcatgaagtccatgaagcagctaaagcatgtccattggacgtgatgttggttgaaacggacgcaccttatttaacgccgacgccttatcgtggtaagcagaatcaaccaggctacacacggtatgtggtagaagcgattgctaaactcagagatgtggcaccagaagaaattgcggcagcgacgtatgcgaatgcccaccggatttttaagttaggagcactatgaaaaaaacaattcaagaagtgattgttgttgaagggcgcgacgatacgaagcggttacgggaagttttcccagatgtttcgacaatcgaaacgcgcggttcagcaatcaatgaagaaattatcgaaaaaattgcgctcgctcaagaaaaacgcggggtcattgtctttaccgatcccgattttcatggcgagaagattcgtaaaatcatctctcaaaatgtaccgggcgtcgaacacgcctttttaccacggacagaagcacgtccggaaaaagcaggcggcagtttaggcattgaacacgcaaaaccagcggcgattgtccaagcacttgagcatctattaacacaagatgaagaagcagacgaacaaatcagccaatcggatttattaacggcgggcttgattgcggggactgattcaaagcgacggcgcgaattactcggcgaaattttgcacatcggttacaccaacagcaaacaactttacaagcgcctcaagatgttccaagtgacgcaagctgaatttggcgctgcactattacaaattaaacaggaattaggagattaatatggaagatattgcaaatcccgagcgtacccggaaaattctcaaacgttacggctttaagtttaaaaagagcttaggccaaaacttcttaaccaacatcgccattttgaaacaaattgttgaagctggtgatatcaccaaagatgacgatgtgattgaaatcggccccgggatcggttctttaacggaacaaattgccagaaaagcgcatcaagtattaagttttgaaattgatgaacggttaatgccggtcttaaaagatactttgaatcactaccataacgtcacgattttaaaccaagatattcttgaagcggatttaaaaacaattatcgctgaacaattcgatggtaagcataatctaaaaatcgttgcgaacttaccctattacattacgacgccaatcatgttgcacttacttgaagcaggattgccaattgatcgcatggtcttaatgatgcaaaaggaagtggcagaacggatcaacgctgaacctggttcaaaggcttacggctcattaagtattgccgttcaacttcattcagaagtgaacttagcctttattgtgcccaagacagcttttatgccacaaccgaatgttgattcagcgattgttgaattagtggggcgcaaagcaccgcttgtaacagttgctaatcaaaccttatttgatcaattggttcgtggcgcatttgcacaacgccgaaagacattatggaataacttgcaaaatcaatttggtaaacaagatgaagtcaaagcagctttaacaacagccttagaagcagtcgagattgcaccgagcgctcgtgctgaacaattgagtatccaacaatttgcccaattaagcgatgcgctgaataatcagccaatctttgctaaaaaagctaagtaagtaattgccaaatcgttggtacaatggtataattgcaaatttttcgtttatatggtatactatccctcgaagaggtgaagcataatgccaaccacacttgccaatattaagaacggtctcgatgggcatatcggagacaagttaatggttgtcgctcaagctgggcgcaaaaaagttacaaagcgaaagggaattcttaaagaaacctttccagcagtatttgtagtcgatttagatcaggatgaaaatgcttttgaacgtgtttcatacagctatgctgatttgttaacgaaatcgattgagattgagtttgatgaagaaccaattgtcctatagtttaaaatagaagaatagagtagcactcaaccaactggttgagtgctttttttgttcaaaaagcagattgacgaatcgccatatacttcacgtggttgattagttgttgacattcgtttgataaaacaatatcatatagaatgattatgacgtatacaaaaagggagaaagaatatgtttggcaattggaaagagaacaaagtgaagttaggtgggttcattattatgatctgcttaattccgattttactattactaatcacatttaattttattaagtacgaacagaccactaatattaaacatatgaaagtcgcggttgtgaatcaagatcaatccgcaacatttaaaggggaaaaggtggcagttgggcaacaggtactaaaaacgttgcgtaatgatcaccaggttgattggcaatttgtcagtgctaaggatgcaaaagcgaacttagctagcggccgatacgcgatgcaggttgtcttaccgaaagacttttctaaaaatgcgacaaccgcgttagataagtcacctaaagtcagcttgttaaaagttgaaacgtctaagaaaaataactacatggccggcatgattacaacccaagtcgtgaaccaaatgaagggcagtgtcgttcaaaaaattcaagaagcttataatcaagccttgcttggtgcaatcggcacgctaggcagtggcgtacaagaagctagcaatggcgttaaaaagttaaacacagcagccggtcaattatcaaatgggagccaacaaatctatgataatttaaatgtgttgcatagtgggacacaacaattggcagatggtagtgcgccattggcaagtggcgtgcaacaattaacaactggtgctgggcaactttcggctgggcttggagattatacagctggcgccggtcaaattaatgccggtttaaaccaactagcagccaataaccaaacaattttagctggtggccaacaaatcagtggcggtgtcgaccaattagctgatggcactaagcagttgagtgcaaaactaactgaagcagccgatggaattgaatccagtttagatggtaatcaagaccaattaacacaattgaaagctggtttaggcgctttaaatgctggtattcaagagttagatcaaaaagttaaccattccaataatgataattccgaaattatcaaagcagacttattaaagattgcggataatacaaaaaatacaggggcacttttacaggatagtggtgcgaatttaagtcagattaacgataaagtgtacaatactgctaaacctgatagtgttgcaaacagtttacaagatgcaggaaatcaactaaaagccttacaagatttagcggtaactaacggtaagtttgcaaagtttttaattcagaatccaactattttgaaagcgttgctggatattggagatgcagcaaaagcagacttgctgaatgctggcagtcagttagagtcttctggcacgaacatgaaggctattcaagccaacttaggcacgatgggcagcaacatgagtgatactggtgttcaactacaggctgtttcagatgaattaacaaaaacggctgataacatggcacaactaaaagccggaatcgcgaagatggcaagccaagaccaagcgccgttagcactaaatggtgctactcaggcgattgatacactgatagcggggttagccaaagtcgacactgggttgaaacaaaaaggaaatacgaccgatacaatgggcggaattcaagctgctgacatgattcatgccggcttggttcagattcaagatggtctaaaagggaaagctggtcaacttggtttaatgtcaggcttaacgacttatctgaatggtgtttcgactgcagctgcggggagcaatcaattagtcgcgaataacaacaagcttaatgccggcggacaacagctaacaaatggtctacaagaattaaaccaaaaagcaccaacgcttgtttctggcattacacaaattaacgagggttcaggcttattggcagatggtgctggacaattaacgactggcttaggccaagcgggtgctgggattagcttattaaacgtcaagttaatcgatggtagcaagcaagttgccaatctttcaacaggttccgcaaatgtagaacatttcgtgcaaccagtcaaagatcaattactatcagatacaaatcatggcgcattaattaataccttctcgccattagtcttaacacttgtcttctttgttggggcaatgttgacgcaattaacactttatcgctatggtgaaacattagcacatagtggacttaagcaacggatgttggttgtagctggcgtagttgtcgcacaagccttattaattgatatctttgcaaacctttttggattgacgattgcacaaccgttcgcattcttcgtcttaagtatgatgacgagtgcggtctttacccttgcatgtttagcattggataaactttttggaacgatgggaattttaatggccttcgggttattgttcttacaactcatcattacagggggactcttcccaaatgacatgctttcaggcttctatcgtggtgtggcaatcttcttgccagggacttacacgattagtgggttcgaacaagttgtcaacggcaatggttcacaactttggttagtcttaatcgtcttggtgatcttttgtgcagtgttcttcgccggtttgttcggcggagagttaaaacaaaagttaacgcaaacaccaaatagtcaagcttaaagatttgtggtacagttaagaaaataaataaaaaggtgggaaatattgtgaaagatagtcaattgttggatgaatacgttgaactttacatgtcggcgattaaatatgtcgaagacttggtttctgaaccaacgcaagcttaccaattgtcttttgaacaatatctgattatgaaagagattgctgatgataattcagtgagtctaattgatattgctaaaaaacgaggcgtaacacgcggtgcaatttctcgacagattcgtgttttacttaaattagactatattacacaagaaattgatcccgatgatcggcgccggttgattttaaatttaacgccgtctggtcaaaaaacagttgaagaattaaatccgaagatccataatcggtttgcctcgtggatggagacgtttggtaaggaaaatgccaagcagatgcttgatttaatgaatgaatttagacataagattatggtaaaagataatcaataatgtcgactgaagagcactgacagatgattgtcagtgcttttttggatgcattgttaaaaggttggtttttacaagcagatatgagtataatgaaacaattaaatgctaggtaaaaggtgaatgtgatgcaacgaattgaaaaagcacctgctaaaatcaatctcagtttagatgcactctttctacatgacgatggggaacctgagtggcagatggtgatgacgtcgattgatttggcagactatgttcagataacattacgcgatgatcccgcaattgaggtccgcacatcaagtggctttttgccagaagatcagcgtaacctggcctacaaagcagctcaattattacaacacacctatcagattccaaccggtgctttaattgaaattgataagcatattccagttgcggctggcttaggcggcggaagttctgatgcagccgctgttttacgggggttaaacgaactatggcaacttggtttaacgcgcgaacaattggcgcgattagggctacaaattgattcggatgtgccatattgcgtatatggagaaaccgcccttgtcactggcaaaggcgatcagatcaaaccactcgggtcattaccgaatttttgggtcgttgtcgtgaaaccggaagtcagtgtttcgacgccgcggattattcgtgcattggattgcgaccagattcaacagcatccacaaactgaggcgctggttgcagccgttgaagctggagatttaaatgcaatgactcgcaatatggggaatgttttagcaccgattacgactgaacgttatccagttatcaagcaattaagtgagcggttattgcagtttggtgcggatgttgctcagatgagtggtagtggtccaacggtatttggtatctgtagtcagtattcacgggctcaacggatttataatagtatgtccggattttgcgctgaggtatatctggttaaaccattgaaaccataataaaacgccgacaatcaaatggttgaggcgtttttaattggcgtaggaatcgctttaatgggataaaagcgaacaattaagctctttttttaaaaaagactaggatttaaccgaagatttctatataattgattggtagacagtttttttcggaaataacagtaaagtaatatatagaggggtattcaacatgaaagttagaagaagcgatcgattaatcgatatgacacgctatttattagaaagaccacatacgttgattccattgacattcttttcaaaccgttacgaatcagctaagtcatcaatcagtgaagatttatcaattgtgaagcggaccttttttaatcgtggcacagggatcttagaaacggttccgggcgctgctggtggtgtgcgctacatgccaatgattaaacaagatgaagcagaagcttttatcgctgagatggcacaacggctttcagaaaatgatcgcttattacctggtggttacgtctatttatcagacttacttggacgtccagaagtattacggcaagttgggcgtttaatcgccaaccaatatgtgggtaaagaagtgacggctgttatgaccgttgcaacaaagggaattccaatcgcacagagcgttgcgatgtacttaaatgtgccatttgtaattgtgcgccgtgattcaaaaattactgaaggttcaacggtcagtgtgaactatgtttctggttcatcagctcgcatcgaaaagatggaactttcaaagcgcagcttacctgaaaattccaaagtcttaattgtcgatgatttcatgaaaggcggcggcaccgtcaatgggatgaagagcttgattgaagagtttgattctgaaatggttggcatttctgtctttgctgaatcagatttcgaaggcaatcggatggttgatgattacacatcaatcttgaaggttgataaagttgatattgaaaataaaacgttaagtgtcagttatggtaattacttaacaaagaatgcagatcgcttagcttaaacgatttgatagcacccggacaggttaattgtgcgggtgctttttttatttgaagtgctttcggacagtttccaagctttgtccgttgcataaatgacagcggtaacatagactgaagttatatttaagaggaggttactatgaaaaaaataatgaatgatccaagccaaattgtaacggagatggtccaaggtttagtgcggagttatccagaccaactcaaacaaattccaggaacagaagcagtgatgaaaatcgccgatttaaaacatcggccacaagtcgggattgtcagtgggggcggtagtggtcatgaaccaacgcacgctggttttgtcggcgatggcatgttgacggccgctgtgtgcggacaagtctttacatcaccaacacctgatcaaatttatgaagcaattaaagcagctgacgcgggccgtggtgtgttcttagtcattaagaattattcaggcgatgtgatgaattttgaaatggcgaaggatatggcggctatggatgatattgatgtccgctcaatcgttgttgatgacgacattgctgttgaaaatagtacgtatacgcaaggacgccgtggtgttgcggggacaatcttcgtccacaagattctgggtgcttatgcccgtcaaggtgctggtatcgaagcaattgaagaattagcgcaccaaattacaccgaatattaagacaatcggggtcgccttatctggcgcaaccgttcctgaggtcggaaaaccggggtttgaattagcgcctgatgagattgaatatggtgtagggattcacggtgaaccaggttatcgccgtgaaaaattacaagattcgaaacacctagcaactgaactagtcggcaagttaaaagaagcccatcacatgacggccggcgaacattttgcggtcatggtaaatggcttaggtgcaacaccactgatggaacaatatgtctttatgaatgatgtcttggacctcttggccgctgaaaatgttgaagtcgacttcacaaaagtcggtaattatatgacctctttagatatggccggtgtgtcattaacaattatgaaattaattgaacctggttgggttgctaaattagatgaaccagtcacaacgattggttggtaaaggagagataccatgttaacagttgaaaatacattgaaatggcttgaattgtttgatgcaaaaatccaagctgaaaaagattatctaagtgaacttgatacaccgattggtgatggtgatcatggtaataacatgtcgcggggcttgttagctgtgcatgaagcattgaccaagcaacagccaaccgatgtacaaggtattttgaaaacgactgcgatgatgctcatcagcaaagttggtggggcttctggtccactctatgggacagcctttttagaaatggcaaaactaagcagtacgacacttgaagtcggcccattattggcagccggtttagaaggaattcaaaaacgcgggcatgcacaagttggtgaaaagacgttgattgacgtttgggctcccgttgtcaaagcggttgaagatggtactttagatgtggctgcaattgaagctgccgtcgaatcaaccaaagatatgcaagcaaccaaaggtcgggcatcttatgtcggtgaacgctcaatcggacatgttgatccaggggcggcttctagtggatacttatttactacaatgttaatggcgggggtattatcatgagtgaatatggtgttgtgattgtttctcacgtaccagaaattgcggccggtgtggcgcgtttaattaaagaagttgccgctgatgtttcagtaacgactgctggtggcacggacgaaggtggtattgggactagcgcaatgaagattcaaagcgcttttgaagccaatgcagggcaagaattgttagccttctacgacttagggagcgctaagatgaacctcgaattggcccaagaactaacggataaaacggtgcatctatacgatgttgctttaatcgaaggttgctatacggcagcggcattgttgcaagcagggacggatttagctgcaattgaagcccaattagcaccgttgaagattaaataagaagtaaaaactgcttaaaatgatgtctgttttggagactgagtttaagcagttttttatatagaataatattcaaaagaaaagatgatttttaataatgtaactagtaataactttaaaatattgttgaggacggtaatgtgattttaaaatacggtaagctatgtattaaatagatattgctgttatatttaaataaattaagaatgaatactatgattaacatattattaggaggattcaggttgaaaaatattattgttactggtggggccgggtttatcggttctaacttcgtgcactatgtggtcaataaccacccagaagttcacgtgacggttttagataaattaacttacgctggcaatcgcgctaacttagccggtttaccagcagaccgtgtggaattagttgttggcgatatctgtgacgctgaattagtcgataagttagttcaaaagacagacgcagttgtacactatgctgccgaaagtcacaacgataactctctaaaggatccttcaccttttattcaaacgaacattatcggttcatatacgttgatcgaagcttgtcggaagtataatgtgcgttatcaccacgtttcaaccgatgaagtatacggtgatttaccattgcgtgaagacttaccaggacacggcgaaggcgttggtgaaaaattcacgcctgaaacccgttataacccaagtagtccttattcatcatcaaaggcgagctcagacttgttagtccgggcatgggtgcgttcattcggcctacaagcaactatttcaaactgttcaaacaactatggtccttatcaacacattgaaaaattcattccacggcaaattaccaatattttaagtgggattcgaccaaaactttacggttcaggtcaaaatgtgcgtgattggattcatacgaatgatcattcaagcgccgtatgggcaatcctaaccaaaggtaaaatcggtgaaacctacttaatcggtgccgacggcgaacaaaataacaaagatgttttggaattaatcttagaattaatggggcaacccaaagatgcttacgatcaagttaaagaccgcccaggtcacgacttacggtatgccatggattcaacgaaattacgtgaagaattaggctggcaaccagaattcactgattttaaatcaggcttacaacataccatcgactggtatcgtgacaatgaagactggtggcaagcagaaaaagcagctgtggaagccaactacgctaagaatggtcaataaatatgaaattaaattttgatgggattatcttataattaccgttgttcatataagtgtcctgtccgtaataataaaccgttagttgtatcagttaatgtcatttttagggcagtgattacttttgaaactgattggggatgacgactgcggagccattcagcggtgtaagcaactaatgcgttggaaagaaaactaagtaaaaaggcttggtagtcggtggataacgtaatgtgatgggcgctagcaagatcttgaataatccgattaatcagttggtggacgtgatgaataaaatggcgttcgaaggcgttttgcccttcaatcgacaaagcattttgatagaaggcgcggttagcatcgaagtagttaaatagttgcgccaacacctgtgtccaatgaatatagctgagatgctcgtcgatgtagacaccgatttcttgatcgtaaatccaatctaataacgcatatttatcagggaaatagtcataaaaggtttggcgtcgaatgccagttttattcatgatggtggtgacgctaattttattaaaaggttgttcaaccattaattgtttaaaagccgtggcaatcgtttgttgggttgtctgagtcatcagggcatctccttttgaacgttattaagtaaaaagtcgtcattcaagctagtgaatgacgacttttgtattatatggaattgcggtatagaaccattgggcatcagctactgataaacggatacagccgtgtgaattagcttttttgcctaattgctctgcttcttctggaatgaaattgccagcttcatctgtgggcacactgtgaaaaagataaataccatgatctaggaaagagcgccaatatttggcaccttccccggaatttgcattgaaaaatgagtcgccgtgttcagcttcgatatagaaggtaccagttggtgtgggtgactcaggggaaccggtcgaagcatgcattgtgtacaaaagatcattgccatttttaaggtagacacgttgctgtgcaattgaaacgtcgacccataaatcgggttgttcgtctaaattaggatatggtgtgttttcggaaggcgcacgccagtcaattggtgtcgggtgagccgctttttttgattttatcgattgttgcctcgcatgcgattgtgatttggtagaggacgtgactgcggcttggtgtgtttgatgccgagctgaggtagaccaatacccaccaattagtaaggcaatggcaacaatgatgctgccgagcattaatcgaatgttgtttgtcagttttggcatggccgacttccttccgcaataaagtacctccagtatacgggataaagcgctaaacttcaatacggattagcttgctctagcctagtatttaagctaaaatagaccagtaatcacgaatgacgaggagcttatgatggttaataaaaatgcaattattttagcagcgggtaaaggtactcgcatgaagtcaaaattatataaagtattacatgaggtttgtggtcgaccaatggtagatcatgttttaacccaagttgaaagaacgcacccaaccaatgtggtcacaattgttgggcacggcgctgaaaaggtgaaagattatctcggcgaccggtcacaatatgcattacaagctgaacaattagggactggccatgcggttttacaagctgaagctttactgaaagatgaagatggcattacgattgtggtcagtggcgatacgccacttttaaccgctgaaacctttgaaaaattatttgcataccatcatgataaaggcgcaaaggcaacgattttaacagcaacggccccagacccaacaggttacggccggattatccggaatgatatcgggattgtcgaaaaaatcgttgaacaaaaagatactaatgataaagaagcgactgttaatgaaattaatacgggcgtttattgctttgacaacaagaccttattccaagctttgcatgaagtgacgaataggaacgcacaaggtgaatactacttaacggatgtggttgaaatcttgaagaaaaaaggtgaaattgtcgctgcttacagaatgccaaactttgaagaatcaatgggtgttaatgatcgagttgctcttgctgcagcaacaaaagtgatgcgtaaacgcatcaatacagaacacatgcgtaatggtgtgacattaattgatccagaaaatacttatatcgaagtggacgttcagattggtaatgatacaattgttgaacctaacgtcgtcttaaaagggaacacaacaattggttcagattgtttcgttggtgctggctcaactattattgattcaacaattgaagacaacattcaaatcacaagttcaacgattgaatcagctatcatgcacacggggtcaaacattgggcctaacagtcatttacgcccaaacgctgaaattggtgaagacgtccatgttgggaacttctgtgaagtgaagaatgctaaaattggcgatcgcacgaagattggccatttaagttatgttggcgatgccacattaggcactgatattaatgttggctgtggcgtagtctttgttaactatgatggcgtggctaaacaccacgcaaatgttggcagccatgtcttcatcggtagcaactcaaacattgtcgcaccggttgaaattgcagatcacaccttcattgcagctggctcaaccatcacggatgatgtcccagaaaaggcaatggccatcgcccgtgcccgtcaaacaaacaaagaaaactactgggcaaaactaccagtagcaaatgacgaagaatggcaatagagtgctggctgtggcggttagtaattgagcattaatacgatgttagattaagcggaaattacggtgacaagaagcacgttttggattaaagtgtgtttgtgacgattagcttagtgttgtaaagcacatcttaaaataaaaatcgtccgtaatcttatttttgagattacggacgatttttttgatacttgtagttattttaaagttgagaaataatcgcgtattaagaaggcgattagaaaagcgggccaaatccaaattgaaccacttgaaaataagattagaagaagtatgataagactcccaacagcggtggttgcccagcccatttttgtaatgcgataatttttaggattatagttcgggtgactggggtagaaaaaatgatactgataaatcaaaacggcaacgaatagaataagaccaagaataaaatagggcatgctgaggtgaaataagcgatcggaagtaataataattaccagaattaaaagatagagattattaaaaatagtgtatttaaggcgggtcatagtaacctcctttttcaattagtgtaccttgtcttgcgctaaatgacaatttaatccataatccaaaataaacaagcatttttggggatataatgggatactaaacgggaggttcgatggtaatcgctattaactttttctttttctctcacgtttctaatgaacagcgcttactttacaacatttgtgaactttttaagttttaatcttgatttccggggtgaaaatgcctaaactttaaataggtactaacataaattttttggaggctgacatgtctgaacaatatttcgaccctaagttgaaaatctttgctttgaactctaataagcccttagctgagaaaatcgcggctgaagttggggttcctttaggaaaatcttctgttaaacgttttagtgatggtgaaatccagattaatattgaagaaagtattcgtggcgacgaaattttcattattcaatcaacatctgcaccagttaatgataacttgatggaaatcatgattatgattgatgcattgcgtcgtgcatctgctaaaacaatcaatgttgtgttaccttattatggttacgcacgtcaagatcgtaaggctcgctcacgtgaaccgattaccgctaaattagtggctaatatgttaacgatggcaggggctaaccgaattttagcattagacttacatgccgtacaaatccaagggttcttcgatattccagtggatcacttgatgggtgctcctttattggctgattatttcttgagcaatgacttggctgaaaatgctgttgttgtttcacccgatcacggtggggttacacgtgctcgtaaattagctgatttcttaaagacaccaatcgcaattatcgacaaacgtcgcccaagaccgaatgtttctgaagtgatgaatattatcgggaatgttaacggtaaacgcgcaatcatcattgatgatatgattgatactgccggcacaattacgttagctgcgcaagcattgaaagatgctggtgcaacagaagtattcgcatgttgtacacatccagtattgtctggcccagctattcaacgaatcgaagattcagtgattaagcaaatgattgttacagattcaattaatcttccaaaagaaaaattaatcgataaaatggtacaagtttctgtcgggccacttattggggacgccatcaaacgaatccatgaaaacaaaccagtcagtccattatttgaaaacagatttaaaagataagcgtgctaacttgaacgggttagctttggggaagcacatttcaataagctaacaattaaaaacgcctgaacaatttgttcaggcgtttttttgtgactttatttttctttgttagctaataaatcgcgaatttcttttaagtaaacttcttctttcgtttcgactacttgtgcttcttcttcttcggtcttcttgcccatgtcacgaagcttgttgaatcctttgacgattaagaagacaacaaatgcgatgattaagaagttaatcacatcgtttaggaagttcccgattttaaaaacggccttggtgcctggaatggtaagcgcaataccggatagatcaacttgtccaacgaataatgaaatgattggattgattaagttctttgttaatgagtccacgatgctttttaaagcagcccccaaaataaccccgacagccatatctagcacattaccacgcataataaattctttaaattctttaatcatgaaaacgacctccattaatattattaattattactataaaaagtataccgtatttccagagcctataaaataaaaatgctgtgctagttacataattaaccaataaatttgttattttcatgaaaaatcgttaagatagtcacaggaattaaataacagaaattagagatagaggaaccttagatgaattggattgtacaattgtatcaaccattctttgaactgagtaattggcaaactgtcattacgtcatcagaagattggcttttaattttaacgttagtgattatggaatgcttactctcagtagacaatgctgttgtattagcggcacagacacaaacattacctacaaaaattgagcaagaaaagtcattggtgtatggcttatggggcgcttatgttttccgcttcattattattggtgtcggcacctatttaattcatttgtgggaaattaaagttgccggttcattgtatttaatttacttagtcattgcttatttcagaaagagtgggcatccgaagcaggctaaaacaccggaggcgggttctaaaatcagtagtccgcatcggttctggcgcacagttgcttcgattgaattgatggacattgttttttcaattgattccgtattagcgtctttagcgatttctagtaatccggtgattgttttaattgggggaatgattgggattatctgcatgcgggggattgcccaactcatcgcccaattgatgaagaaaattccggaattaaatccgatggcttacatcttaattctcttcatcgcgattaaattattcttgtcgattccagccattgactatgaaattcctaacctagtgtttgctggaattgtgtttggcgttattctactgacgctcattattcattatgtccgtgcagcacgggctaaataggcatcataaaaaagccgttgtggacaaattgtccacaacggctttttacgttacatatgattgagtaaaacagttaaggctgcaaatgcgacacttgcaattgcgactaaaatgaattgatgctgtttcattttgagaattgcaatgaattcacggatgattgcatttggtaagaagtaacgcgatgttttagcgccaatgccatctgctttcaaacgggcttgctttgcaaaaagcccagcgcggaatgtgtggtaattattggttgcaaaaataattttaggattcgttttagtggtatcagccatgataatgtcttttgaaaattgcatgttttgtaaagtgttgactgatttttcctcggtgagggtgtctttaatcggaatcccttgctcaatggcgtaacgttgcatggcaactgattcaggcagcttctcatccggaccttggccgccagaaaagaccagttttggtgcagggcggccttttttgacttgtttatcataaaatcgaatggcgcgattaatccgactggccagtaacggtgggacgaattgaccatcgattaaaccgctacccaagatgatgatgtaatcttgttgataacgggggcggttgaattgatagataatcagtgaggttagatataaatagaagaacaatggaatatacaaaagaaaaaccgatacaattatgctgacaaataatttaacatcggcgggaatgtgtaacaagcgcgtgatgattgggatgaaaaatgagccaatgatggctaacgcaatgaggagggtcagcatgttggataacgtgtgactttcttttttccagacaatatacgcgttccacagcaacaagacaataccgaataagtagaagaacatgacgattagaacgacaacaatggcagcagcaattgcaatgttattcagcgtttcgttattgaggcgaatcacaatgagcgcagcatccattaatgcgctgaagaggaaaaagttaaacacaatgccgttgattaattggcgtttttcaaatcgctgtaaaccaatgaataaaatcaaaaagaaaaggggtgacgcgtaaacgagatcaattaacgtagtcataataactccccttatgattaggcttggctttcaaaggcgtatgtttcaatggcgtatgccacgccatcttggccttcatggttactcttagtaacaaccttagcaatttttttcaattcaggaatggcattatccatggcaactgggaagccggcgtattctagcattgatagatcgttaccttgatcaccaatggccattacttcagattgatcaatatttaaggcatttgctaaatcgcgcaaaccatttcctttaccggcgttcttgttgagtacttcgagaaagtaggcttcactttgaacaaattgataacgatcgaaaaaatcagcaggaatcttggttttggcttcagctaagacggcgggttcgtcgattaacatcacttttgaaaaggccttgttaggtgtgatttcatcgacatggcggaaacgaataggcatgttgacgagggcactttcaccgactgtgtaagggctgatatcgcgattggcggtgtagatgaattgatcatcttcagcgtgtaaatgagaaccgatttggcgggagagggtttcaagttcaagatattggtcatgcgtaagagtgtgacgcactagaatttcaccagttgccgtattttgaaccaaagcaccgttgaacgtaatcacatagtcagtggcttcagttaaacccagttcttttagaaaaggcgtgaccccggtgagtggtcgcccagtacatagcacaactttaacgctatgttttttagcagctttgacaactttgattgttttagggctaaggatgttattttcatttaatagggtgccgtccatatcgacagcgacaagtttgattgacattataaaaactcctttttagtggttaggattgattgcaccgttacgcaagtatgctttgaactggcggtatattggtgcgaagacttcgatatcattttcgttgagcatttctttagggaaatagaagcgttcatcgccgctaaaacggcctgagatggcggctaccaagtcacttaatgatgataactcttcaagttgaccatcagattgtataatttcaatctgggttttgggtgatttagcggagggatcataggcgtcatacggcaaatcgaaactgttattaacagcagtgtaatactcactgttataaccagcttgctcggttagcgcccgtaattctggtaaaacacgttgggtctgttggctaaaggcaaccgatttgagtgggcggcggcttaaaaagcggtcggccaaatcattgagcactgaatccggatagtctaaccagtatagaaaataggtattcaaaacgccatcatctaattttaaatagtcttgtaaggtgaagttctgttcgaaaaatggaatcaataattgcggtgcgagactctgatgatggtcaggctgttgataaagaaatttcgcacgttgcaagagcttttgcaagataacttccatgccgcgtgaaacaggatgaaaataaacttgttgatacatctggaaccgactgacgatgtaatcttcaacggcatgcatcccgtttgctaaaaaggcaatgcccttatcgtaaggccgcatgactcgtaaaacacgcgtcaaatcgaattctccgtatttagtcccagtattgtaagcatcccgtaataagtaatccatgcgatcagcatcaatctggctggaaatcatctggacaacttgtggattcggataagaatgatcgattacactagcgactttcgcagggaaatcatccgcaacttgggttaagacgcgattaatggctgtctccgggttggtgataatttggcgcgtaatcaattcatgatcagtattgaagatgtgttcgaaggtatgtgaataagcgccatggccgatgtcgtgcaataaagctgcacataaggcgactaaccgttcatcatcgttccaaagtccatcaccggcaacttgactagggtagttaagttggaattgatcacagatttggcgtgtgatttcataaacacctaatgagtgggtgaagcgggaatgttcagcgccttggaaaacagaggaagtcgtgccaagctgtttaatccgccgaagatgttgaaattcgggggtgtcaattaaatcgagaatcacttgatactcgacgcgaatgtagttatgcacaggatcacggaatactttttcacgcgatagtttaatagcggtgttagtcacaatataatctcctttttgaggcccgttaaacttgataacggtggagtgctgtttgttttttaagtagtagttgttgataagctttcgtttgtaattgtggtgtgaggtcaactagttgtggttgttgaaccaatcggctaaaagcggtctgtaggtgcgtaatggctgttgcaacagtcattggttcgtttaacagatcagataggttggccatggtgtccgggatgaccactgggaaagtccaccgcgtttggctttgtgcttggccagcagtgtaaaaactgtgcatgagtttgccacgcgcctgttgattgcctgtaatgctggcgtataagagtacggcaattccgtttttggcacggcgttgggcaataccggcaaatttttgaccattgatgctgagatcgtattcgccagggcaataggagtgagtgacttcgaaatggtcaatcgtgacgggatagtctgcaaaggcagttgtgaacaattggtgcatgagcgcgtaagcggcattaatgcttaggtgatccgccatatcaggaagatagaagctgacgttcaagacgccggcatccgtcacaatccccaaaccaccagcgttacgcacgaaatgggcatagtgtgcagcctctaatgtggcaaccgcttgtggataagcaggtaactttgtatccatcatgcccaaaataacattgtcagcaagcgtccaaaaatgaataataggttgttgtaattcgcggctcaaagctaagaggctattagcatgagcaaaagcgagtggtccagccgctttttcaaaatgttgggttaaaatagcccattcttgattggcagataaagtcgctaaatcatccatggtaatcacctccgaaaattaaaaactcttcttaattatagcgtaaattctaggcgctgtctgcaatcggtacgctggtcaaagagaattggcggattattctggcgctcaaattttgaatggcttataatagaactacttaattaaaattaaaggaagttatttatggcaagtcaaagcggaattccggtcaaggtacaccttgaaacgcaaattcaacaagatgggcaacttgaaaaacacgttttcgatgaggatggtcaagttgtcaaaatgggagagtcactttacttacgttatctggaacacggtggtgaacaagccaccgcggtacggtttaaattggctgctgacggtcaaattcaattaacgcggggcacagaagaagacgagacgcaattgcggttgtactttaagcaaggtgaagacctcggatcaatttaccaaacaaaatatggcaacatgccagtgctcacaacgacaacccatttattatcgatggtgaaggaacaaccgttatcaggtgaaattacggttcattaccaacttgccatcaataatcaagccgtgggggattacaaattacgattgatttttacagcttaagctagtatgattaaggatagactgttgaaaggacgtgtactggttgaaattagacgtttttaaaggccaaaataaagaagaactatcaatgattgaagtcgcacatgcaattttagaagaaaaaggcgacacgattgcattcgctgacttaacgaatgaaattcaaaactatttaggcaaaagtgatgaagaagtgcgtgcacgcttatcacaattttatacggatttaaatgaagatggtagtttcatttctttaggcgaaaacgtttggggcctccgttcttggtacccatatgaatctgtcgatgaagaagttaaccatccagaagatgaagaagaccaaccaactaagaagaaacgtcgtaagaaggttaatgcattcttagcagatgttaccgacgatgacgatgtgattgattacagtgacgatgatccagaagacgaagacttagatgctgatgatgatgttaatttagcagctacagatgacgttgctggtgatgacttaactgaatacaaagctgacttacaaaacatcggtgacgatgacgatgatgaagacgatgatgccttagaagatggtatcgaaggtcaattatctgaatttagcgatgatgatgaagacgacgaagacgaagatgacgaactttaattagacgtttccaattcgttgccataaaaaaagacgccaaagttaactttggcgtcttttttttgcgtgggcaagggaggtttttatatggttgtttcactgttagaaaaagttagagcgctcaatccaatcgttgctaatgtcgcaaatggcgtcacaattgatcaggtcgccaacgcacaaaatgcaatcggtacctcaccaattatgtctaatgcaccagaagaagcggagggaattgttaccatcgcacaagccattacgattaatattggtagtttgtgggcaccacagattcaagaaatgatggccctaatgaccgccgcttatcaacaacaaaaacccgttgttcttgatccagtggcagttggctcactggcctaccgccagcaaattatcgagcaactattaatacttgacacaccaactctcattcgtggtaatgcaggtgaaattgcttattttgctgggatagattggcaagcaaatggcatcgacgccgggcatggaaatagcgatccagtcattattgctaaggccgcggccaatcgtttacacaccataattttattaacgggtccgaccgacattattacagacggtcaacgcgttacgctgatttcaaatggtacctcactttttcaaacacatgttggttcaggtgatatgttatcgggtctctgtggtgcatttgttgcagttcatcctgcagatccctaccaagccgctatcgaagcagccgccacatttgccgttgccggcgaactagtagccacagcaatggaaacaccgctacctgggaccttctatccccaattaatcgattatttattccacattaccccagccaaagtagcaaataccgtccaactaagtgaggtgcctactcatgaatgaattcccacaagctctaaccatcgccggttctgacagcggtggtggtgctggtatgcaagctgatattaaaactatccaagagcgccatgtttttgcaaccaatgtagttgtcgcgatcaccgctcagaatacgcttggcgttcaagccagtctgccactaccactatcactaatcaatcaacaattcgcttcattggctactgactttaaaattcgtgcctgcaaaacgggaatgttggcagatgctgaacatgttgcaacggtcgctgaaaatctacgccattatgattgggggccgctcacccttgatcctgtaatgattgccaagggcggtgcacagctacttgccgacgatgccatcgataccctacgtactgaattattgccgctagccacagtgctgacacccaacttacccgaaaccgaagttctcacgggcagccgcataaagacaacagctgatttcaaacaagcggcccaccaactccaacaaatgggcgccaagaatatcattatcaaaggggccatttagactatcaatcacaagccgccgattacgtcctctacgctgatggacaagatgaatggttaactacaccacgaattgctactaaacgaacacatggcactggagatacgttttcagcttgtttaaccgccgagctagctaagggcacctctttgaaagcagcaattcatattagcaaagcctttatccaagccgcaattgctaatccaattgctgttggtcacggccacggaccaaccaatcactgggcttatcagaaggttcatcatgactaacatttcccgggaaatgttccaaacttatttggtagcgggtacccaaaataccggtatggatgattttctaaacattctcgaacaagcactacaagccggcattacctgtttccaattccgtgaaaaaggtgctggtagtctgcaagattccgatgcgattttaaagtatgcgacagcggctcaagccctttgccgccattatcaagtcccatttattatcgataacaatctcgatttagcacttcaaatcaatgcagatggtattcatgtcggccaaagcgatcacccgtggcataaaattgaaacggccaaagcacacggcttaataactggtctatcttgccacactgaacaagaacttcaccaaagtcataatcaaccgatacttgattacattggcattggtccaatttttccaaccaattccaaagaagatgctaaaccagcacttggcactaatcgcttgcgtttcttaacgcagcaaagtgaactgccagtttgatccaccaaacatttaaaaaagccgctagaaccctttttatagagtactagcggctttttctcggtagtttgctgatatttagcttagtgctttgttagtgatgactactccatttaacactactcggtaaacttattcattagcaagggcttcaaaataacttgctttttgctgcgcccagtaggcctcttctgcctcatcaatcggccggagtacccgacatggattaccaactgcaatcacgttatcaggaatgtctttagtcacaactgatccagaaccaatcaccacattgttcccaattgtcacgcctggattaacaaccgtattgccaccaatccacacatcatccccgatggtgattggcttaccatattccagatcatcccggcgttcttgtgccgtcgttgggtgaccagctgtgtagagtcctacacgaggtccaaagaaaacgtggttcccaatcgtcactggtgctacatcaataatgatgcaatcgtaattcatatacacatgctcaccaatgcgtgtttggcaaccataatcagttctaaatggtggctcaatatataaatctgagccacttttcgcaaataaagacttggttaattcgcgtcggtaatcttgttgttcttcagtggtttgattaaacaaccgagtaagtacgcgcgcgtgtttcatatcggctcgcaattctgaatcgttcgcccgataaatttgaccattaatcatgcgttttttttctgacatttctttatcccccatcactactaaaataggtgcgtcacaattgtggcgcacctttttaatttaccaaattgcaacccgtttagcgggtgctaagtacatctgatcagctttcgttacattaaatgtctcgtaaaaggctgccaagttttggacctgaatattggcccgcaacgcgtttggtgcatgaacatcaatatttaacaataattgttgatattgctttgtagctttcatccgccaaatcgttgcccaattgacaaagaaggctgccaaatcaacatcaggttcttctttggctgcttcaagggcacaactcaagccacccgcatcggcaatgttttccgagacagttaatttcccgttaactgttgcgcctgcatattctaggccatcaaattctgcaatcatttcttccgaaagtgtcttgaagtgagctaaatctgattcttgccaccaattatgcatgttgccatactcgtcgaattgcgcaccgttattatcaaaagcatgtgagatttcatgtgcaatcactgcaccaatcccaccgtagttagcactactactttgttctaaactgtaaaaaggtgcttgcaaaatagccgcgggaaagacaatgatattcttcgaaggtgaataataggcattaactgtggcagcgcccatttcccacttattacgatccaccggttgagtaagtttcgcaaaattttccgtttcaatcgttcgaataaagtcagctgtattttcaaataatgtcccatcttctgctttaggtactgtgaccaacttcgcaaaaataggggcaatctgatccgggtaaccgacatgaatcccaaggtggttgagttttacaatcgcttgttggcgtgttttttcggttagccagtcatttttttcaaggcgtttttgataaacaccaatcattttttggaccatcttttggacgtcggccttggctgcttcaccgaagtattgccgaccgtaataatcgccaacaacttgattgaacatccctaaggcaaggtagtaagcactcttttgttgtggacgagcttccttgctaccagataacgcacgactatagagcgaactaatttggcgtgcctcttcattcagataaccgctccaactacgaactgtcatgactaacagccacgctttgaacgtttcgaaattggcgtctgtcacaagctgactcagttgcgcaaaatacttcggttccgtcacgataattttttccggttgaacaggtagcaccttgctaaataaacgtggaaaatcaagcgtcgtttgttgttgcataaaatcactcaaaggctgtggattatagagtttcgtgtaatccgctgcttcttcggcactcttcacataaggtgccagtgaccgatcaaatgccaacgctaatttaaccgtcttcgttgcatcaacgggcgcaatcccaattttctgcaagagctgaaccatcatatccgtaaagacggccaataaatggtcagcattgggattgtcagcttcataataggtcttatctggcaaaattaagtcgctagcttccgcatacaacgcgtgatgggctgtgtctttcatgtcagcatcgacagataagccaaatggtgttggtaacccggaaagtacccaatcagctaacccacgattgtaagttgctaaactatcgagagattgcacccgggctaccattggtaggatcggtttcataccgagtgcatcccgcgtttgaaagtccgcagctagttcgtaataatctagaaaatgttgtaacaatgcgttctttacggtcgacatcttagcaaaatcagccattaattgctgatcaatctcattaaccaaggcgacaaagccgcctgttgctggtttatccgctggaatttcagccgtttttaaccattcttgattcactgccgtataaaaatcatcttgcattcgcacgtttgtcatcattgtcctcctcaaaagcagattctttcccaattttaacattttgccactttttccgttaatgctttgacccccataattgcaaaaaagccgcaatttagcggctatttcgttggtaattgtttttcaacttgataatttgaatcttggttaagtttaaacgtcttcttcaaaccgtttgatagatagattttattatcttttgtgatcatgatggcttggatattcttcggtttgttgttgatgagctgcatgccttcgacaatccccttattaaagacagcatttgaaagggcatctccatctactgacttaggcgagataattgtgacactcgctaggttattttcatatgggtagccagtatggcgatcaaagagataaatgtaagtatgcccgtctttttttagataatgttcataaatccccgccgtaacaaccgaaatatcacggcctttaatcgtaccgactgattctccacgcgcctttttcggatcttgaatgccgaccgtccatggtttgttcttccctaatggtgaatgccccataacaatcacattcccacctaaatcaataacggctgatgtcacaccattttccttaaaaacttgtttaacttgatcggcaatgtaccccttagcaatcccgccaaaatcaagtcgcatgccttttttcttaaggtaaactgtacgtttggccttattcaaaacaacgtcatgataatcgactaatggtaacgcttggtcaatttctgcttgtgctggcacccgcgcgcctggtaacccaatttgccataaatctgtgatcgcaccaatggccatatcaaacgcgccatccgattcttgactataatgtaacgctttttccattagtggccacatatctttgctaacctgtacaggtttaacaccggcgttatcattaatcttatccaattcggaacctgatttggttaacgttgcttgattttcggactttttaatccgcgcaaaagccttatctagcacggcttccttgtctttattatagattcgcaatgtacaaatcgttccgagatagtaatcacttttttcatagggctttttgaccaacgtttctttgtccgctggcttactttgacagcctgccaataccagtgtcacccctaagagtgccaatccgaattttacccatcgtttttgcatcgttcaatcgctctccttgctactaaaatcacatggctctatcataccatcaatccgctttaattagttgtaaaaatcttctactggcgcgattctttgagttgctgataggtggcaattaatgctttaaaaacacctttatccgaataaactagaatattcatgcgatagataattaatgctaaataagtcagtccaattagtgtcgccatggctatgaagagtcccatgctagccccgaacgcgccaacatcaccgtttgccagccgcacaggtaacataatctgtgaaaacaatggcacatagctcaccgcccgcaataatggaatatcggtctgtgatgccagtacaaagccacccaaataacttaatgtgcccagtaaaatcaatggcgaaatggcttgttgtacctgatccattcgagacacaacagcgcctaacattgcagctaatacggtgtagagtaataccccaataattaaaaagactcctgcataccacattgctggcgcaaccaaagcacgacgaataatcggcaataactctgctaacggtagttgctgtttcaaaaactgaaacccgacaatcccaactaaaatatagacagtaatttgggtgagtaatagggctaatatcgcggcaatcttcgcgaaaaattgaatttcaatcgaaacacttgatagaatgatttccatgattcgcgaccctttttcagtcgcaatttcttgggcaatcattccagcataattcacgataaagatgaacattaagaccgtaattccaattgaaataatttggcccacttctttagtgttttcctgggaaatcttttcatgaccattctggtaattaaccgtcactggtgcaatgacagttggcgtcatcaatttctggatctgttcaggtgcaacgcctgcttgttgcgccaaagctactaaatgaatctgatttaactgattctctaagacactcgcatcaaatgatggactatcttttcgttcatagtagcgactgattgtctgtcctttttcctcactcaacaacaaatagccatcaattcgctctttctggagcgctttggtggcttgttcccgagtcgtaatctgctgatcgatttgatatgttttaccttttaactgctgtaattcactctgttctgctggttgcggcgccaaaacagcaattctaacgggttctttgctatgatccatcaagcgactcacaccaaacgtaatcccgagcatcacaattggcatcaaaatcatgattagatacgctgggcttttaatattctttagaaatacttgtttaaaaatcaccttaaacttaaacatggccttcctccactttcattctaaagatttcatcgagcgttggtgcttgttgactaaactctaggatatagccattttgtgtcgctaagtcgaaaatcgttttaccaaccgtttcgtctgccaaagttaattcaaaccgctgcccgtgctgtgttacacgtgaaacaccgttgatatttgctaaagtttcgcgtgctaacggtgcttctaagaataattgcgttcggccaaactgattccgaatttcatcgattgtaccggcgagcaccacttgcccatcgcgcaacatcacaatccggtcactaatccgcgcaacattcgtcatatcatgactcgaaaaaatgattgctgaaccttgttctttaagccataaaataccttcttctaaaagttctgcattcactggatcgagtccactaaagggttcatcaagaataatgagttccggttgatggatcaaagtcgcaatcaactgcactttttgttgatttccctttgaaagatccttgattttatcagtccgcttacctttcaccccaaagcgcaccaaccactcatcaatctgtggtttgatgtctgcgatgctgcgcccacgaagctgtgcaaagtacaaaatttgttgttccacggtcatctttggatacaatcctcgttcttctggcaaatagccaagttggtcataatccgcagcggtaaacgcgcgacctttccagagaatagttcccgtatctggtgccatgaaattcaagatcatccgaaaggtcgttgtctttccagctccattttgaccaattaagcctaatatttcgcccgacttaaccgtaaatgaaacatcgtcgaccgctagcatcgttccgaaacttttggataaatgtgataaagtcagcacgtccccaaccccctacttttcattaccttaactataccgtattcatttagaaagcgcattatctctcaatgaaatattaaaattactgattaaatcttaatagttgaaaaatatttgctatactacaattatttattattaggaggtattattttgtccccaaatcaagccttttttctcactgttattggttgcctgttagctatcagttcatcttattttatcgtgcgtctcaatatgctaaagccaacactcaagcaaaatttcttggaccaatatcctgacacggatgaccaagcttacaaagtgcaacaatcaatgaaacaagcttatttcaacgcatccttttacaagcaagctgttcctttaacatcttggttagtccttttattctttttatcaatcggtggctgtctaacagcgctctatctagatgccctgaacattgcaatccgtcttttggggagtgcattcatttttatcgcgtttctctaccttaagttgccgacttttcaagcacagcatactttttggaaagcctatctacaagcgcatcctgaaaatgaattaaaagtcgtcatactcccactcgattcacccattcaacagcggcggattgccttactcaccaaatttaaatgttgtactcttgtagcaggtctcatattgttttacgcctctctttttctataactcaaaaagcggcaccaaccattttatggttggtgccgcttttttaattaacgaatttcaattgggttcgttggttggtctgattcacttaacttcggtaacattaattgtaagacgccatcttgatattgcgcatcgatttgatcccggttgacaccaggtaggtagaattgccggctaaagcgcccataatgccgttcgctttgaacgatattgccttgactgtcactatgatcagcgaaactatcacgtttagcactaatcttcaatgtattatcttgataatccacgtgaatatctttcttgtccagtcctggtaaatcaaccgctaattggtaatccttatcggtctctttaacatctgttttgagtaagttgtccgtttcaggcgacattgccaataattgctgaccgaaattcttgaaccaatcatctccaccaaaattatctagccaattttgacgaccattcattaattcgtttgccatctctaaaacttcctttcttaatctttacaactctattctagtccgttaatcatgaaatgcaagtaattagcattcgacgttgttgagtgccaatttttaaactagaccactgatttttcagctttttgatacccgcctaatatggttttgtgctatacttaaggttccaaaaatattcggaggtaggttcatatgaaaattgttgtcttagcgggcgggcgtagtaccgaacgtaacgtttcattaacgtctggacacaaaattaccaatgcattacaaacgaaaggccatgacgttgctttcgttgatcttttcttaggaaatgatttgcacgacgtcgcatcaatcgatgatctttattcttcaacacctgttgaaaaagattacgacatcagcgacgaagttttaacagacgacgccatcaacgcattacgtactgatggttcaacacaactctttggcccgaatgtcttagagatttgtaaaactgctgatattgtcttcctcgcacttcatggtggcgatggcgaagacggtaaagtccaagcggttctcgatctctttggaattccttataccggtagtgacacactcgcagcaggtattacaatgagtaaaaaggtttcaaaggaaatcttattatataaccaaattccaactgctcggtttgtcgctgcttatcgcgaccaacccatgccagaaatcccatttgagtaccctgtcgtggtaaaaccaagtaacggtggctcaagtgttgggacgcatatcgtgcacaacgaagctgagttacaaccagctgtcgaagatgcacttcgtttcgaccgcgaggctttaatcgaagaattcattaaaggtcgcgaattctcacttggcgtgattaatggtcaaccattacctgccattgaaatcgtcgttaatgacggttggtatgactttgagcacaaattcgtgactggaaataccactcaatttgtcacaccaccaaacgatttacctgatgatgtgcacgaagccatgaaacaaatggcacttgatgctatgcaagcacttggcttaacgaactacgcccgcatcgacttcttctggagtcctgaaaatggcttacacgtgatcgaaggaaatacattacctgggatgacgccactttcattaattccacaagaagcagaagtgcttggtatcagttatcctgatctttgcgaaatgattgttcaaggtaaattagaactccttaaagcaaaatagccaataaaaataaccctgtcgacgattttcagtcgacagggttatttttatttggttcatttaaaactgattacttagttcctgattaggaactattcttaaaaaaacacgtcgattggaattcccaagcggtcatgtagtaattgaatttctttgacggtaaatggaatcttccctctaatcttacgattagccgtcgttaatgttttgcccaatacatcagcaacaacttgctgtttcaaatcatgaccctttaaataacctgatagaacaaataatttttctgccacattcagcacccccaagaaacgttatcaatcccgttccacattaggaatattacgataatgtaagaactctgtcaattaaaaactttagtcccaagtgttcacttattgacgtcatttgtcatataattaaacttataagtcaaacgcgtgataaaggacggtgctaaatgttcggacaattattacacgataagcgaactgctaagaatctaacaatgcaacagctcgccgatctactcagcgcaaaatataataccaagattagtagctcaatgatcttccggtgggaaaaaggcgctgccccatcactaaaagcattatttattgttgctgtcgaattgcaaatcgaccttaaccaattggccacccttgttgcggattctaaccgcgtcaattagccgcttttttttgtttttttcccgatttttgaatggtcttcacacctagtacatctaaaaagaacgtaaagattggtaatccaacaattaacccccaagttcctaagaaacgttctgctacaaataaaacaacaaatgtaaagaaaattggcagctgtgttttactcgacataaatcgcggattcaaaacatatgcttctagggcatgaatgactaaaatcatcaccaatatataaaccacatactgaattccgccgactgaaaaggcgataatgcacaatgggatacatgaaacgatgactcctgcgaccggtaccatcgacaataggaaaatcatgatggctaaactcggaatattaggcattttcattaccgttaacgtaatcgttgttaacactgtattcacaattgcaatgaagatttgggcttcaattaccacgccaaaggtattcacgaattttttagcaaaatacatgatatcttggaagaaccagccgtaagtactcttcaaaaagagttttccaaactgcggtaatcggtctagctcaattgtgtaaaagaaactcaaaataaacgataagacaattgtgacgcccattgttccgattccggtgatgtaattaacgattgttgatacaccgtgtttcaactgatccgtcaagttgaactgtttcatgtaatccccaatggttcgcataaattgattcgcatcaaatgatggactttggtagaaattatagacactctcgcctaatttaattgactgtttagcaatctgtggcacataaatcgttactgctagatacactaaaaaaatcaccaacatataaagcggcacaaccacagctgcgggcggaatttttgaatactgttggacctttcgtactaattgagtcactaaaaaagtaaagatgaacgtcagcaaaatgatattcatcatcgagcgtgacacatagatgaccccaatcaacgttaagagcactacaactcgtcttaactgctgattcgtcacaaatttttgatataaactcacgcaactttcctcctatggcaattctatatcattattttacaacacttcgaactaattggatattctggaattccgatagttgcgacttacatctttttaaaaatagtcgtatactactctggtacttcaaatttacacctagaaaggattttcggtatgttagaaaaaactttttataagaaactactacaacactcttttgatttccctgttactgtcaactattgggacggcagctccgaaacctatggttctggagagcctgaagtagcgattacttttaaaaaagcgattcccatcaaacaattgtccagcaacgcatcattagccctcggcgaagcgtacatggctggcgaccttgaagtgacaagtaatacaacagataccccacttcaaaaactattaacggcggcttacactagcgcagacagtttcatgcgtaatagtcgctacattcatctgattccaaaacaatcgcattcagaaaaggcaagtaaaaaagatatccaaagtcattacgatttagggaatgacttctaccaactttggttggataaaacaatgacttactcatgtgcttattttgaaaaaccaactgatgatttagagacagcacaaattaataaagtgcaccatattttacgcaagctcaatccacaacctaaccgaacattgctcgacatcggctgtggttggggcaccctcatgttaaccgccgctaaagaatatcatctcaaagtggtcgggattaccttgagtcaggaacaatatgatttcgttcaacaacggattaatgacgagggccttagcgatgttgctagcgtccaacttgttgactatcgcgaactcaaacacgccccattcgattacattaccagtgttgggatgtttgaacacgttggtgaagaaaatcttggtgcctacttccaagatatcgctgactacctcactgatgatggggttgccctccttcatgggattacccgtcaacaaggcggtgcgcgcaatgcctggattaataagtatattttcccaggtggctatgtacccggtttagttgaaaatacacaacacattatcaatgccggactacaaattgccgacatggaacccctccggcgccattatcaaaaaacgctggaaatctggactgctaattttaacgcccaaaaagacgtcattttaccaaaagcaggtccagaattcgtccgcatgtgggatctctatctccaagcatgtgcctcatcgtttgaatctgggaacattgatgtcattcaatacctcgtatcaaaaggccccagcgcaagagacctcccaatgacaagagaatatatgtatgattagagtgctgactgtcgcgcttagtcattgagcattaattcaaaaataacataaatccaggttttaggatttatgttatttttagattaagcggaaattactgcgacaggaagcacgtttagagtgctgagtcgaacgggttggctttgaggattaacaaaaaacgggtattatggtgatttttcagccataatgcccgtttttaggttaaccggaaaaggcagctcgaggaagcacgtttcaaatcaaagtacctgattctgcgggaaagatatggcagatgaaacccgttttcgttagcgtgctgactcaaacgggttggctttgaggattacccaaaaaagacccgctaatcaacaatgattagcgggtctttttttattgccttattttaaaagcgcttctgccttttctctaacttccgcgtcgctcatcttaagatagggtttcattgcctcaacggttttatccgtgttccggccgttggcttccatatagtgatcccacaaagcatcacggacgattgtgttatcgtcactccaatcaaatgcttctgacatcttcatatctaaaaccaatgttttttcaacagctgctgccatattaaaaacctcccatttcttttttacaactctaatgataaacctcttttgaaaaagtgtaccaaaatacgcacttttattttttagagtcctgttagtaggtttaaaatcacgatttggctaatgccaattgccaagacaacatgggttaagatttcaaataataaaatagcatagacgcgatcaaaagctgcccatcgagtttgaaataaactaatcccaaccgcaatgttcaaactgacgtacatcactgcaaccatgattaagacgaaccagatggcggtcatcccgaaacatagagcagccaacagcgcagctaatgctaaaataacggttatcccactgtacgcactaatctccgttagatacgcgcgcaaggtggttgtcgtcttcttcaataagtaacgcttgagtaaaaatccgattcccaaaacaaccaccagaataaatagttgtccaccgagtgccttcatatcaagcggtaataagtttagccgttggcgcaagacaatttgtgacgccatcaccccagcaaccgcaccaatttgttctgaccaactggcaatgagcaaacttgccgttgcagtattcattaatataaccagaccaaacgtgactaagccaaaccacaggttggcccactgccattgcacctttagcggttgttttaaactccgcgctaaaaattgatagtattgttgcaggagcgatgtttgctgttttgtttgcgttgattggtgcactagaccgcaattgggacattggtgcaatttacgcccatatttaatatggcattgtgtacattctatcattcgtctgatctccaaatacttaatttaccgtacaactgtgactgaacatggcgcgtatttcgctaaatagctcgcatgtgtcccgattaaatgtttagatggtttcgtctttgaaccacagatgaccaagtctggttggaaactaggaatcacttcttcaacaatcacgtgtcctggattaccttcatttaaaatcggcgtcacatcttcaaccccgaattctttcgctttttgaacataaacatctagatcggctgcgatttcttctcggcgcccttcaaccacgtttggtgagagtgattgataaatgttcaaatcgccggtttccaaaatgctgacaatccctaatggaatttgataggccttagcaagcgtacaagcatagttaaaggcccgtttggatgaggttgtgtcatcatcatcgatagcaattaataatttttgatagtgcattgattcaacttcgatatttaattggcgtttttctgtcattagttaagactcctcgtttatttaatcaataatgcttctttggcatgaattaattccgtgattaattggttgactggggtcgcaatgtgcttttcggcgcctttgcgtgccacgtaaccatttaagtaatccacttcggttaagcggtgatgttgcactaaatcctggtgcattgaaggataatgaccacctgcttgttctggtgcaaacatcttgctgatgtgggcaatcgtcgtgggaatgtctaattcaacggcttctgttgcagcaaccgctgagaattccgccacaattgaacgcaagagttgttgcgcttgtggggtttggcccaattgtgcaatattacagtctaacaaggcacacaagctgttcagtgtcccattaacgcaggctttacgccagattgaaaagagtacatctgaactatattgcgcatttaagccagccgcactcaacaaggcaactaatgcttgtgccgattctttgccatctggatcaacattttgtaattcgacattcccagagcctgttaatgtaatcgcacctggtcccgttaaccccgccgtccaaagtgtaatgccgacaaaaatattttctttgggcaggtattgttcaatcgtttcgggatgcccgagaccgttcaataaacagactacttttgtcttagcaccgattaagggtttgatggcttgtaacatgtcgactagctgcatcgattttgtgaataaaataatgacgtcttgaacttctttaatatccgttggcaaagcagccggaattcgaacctgaacgggttcgtgccccgcttctacaaccgtcaggccattggtattgattgcttgaacgtgttctgcccaattatcaagtaacacaacatcatttccagctgattgtaacatgtaaccaaaacgactgcccattgcgcctgagccagcgattgcaatttttgtcatagattataaaagctccttttatgatttgaattctttttaatcatgccacatttttaagattttttcacccgtaaccgcttaattcaacttaaaaagaagctgtcaaaccgcttatagcagcctgtcagcttcttaaaataggaatttacgccttcttaaaattaattgatcaatcaataataagaccaagctataaccaagactcattgcccatgataataaaatatcaactagcgaaatgtgtcccaacgtgttgaagagttgcgccatggtcgaaacgggtggcaaaatccccagaatatagaggtagggatgccagtaattgacaatcgcttcacctaaactgccgagaaccaccatcaagatggtcaacgtaccggccatccggcgattcactaaaattcgccgttgccagaacaaaccggtcattactgaaacaggtaaaatactcgtcaacattaaggtcccgcctagccaatcccaccagctaagtcctcgaccaaaagcgtggtgcccattgagcacgtaagtaattgccaagcttcccatcccaattaggacaaagaataatcccaacaagatgagatagctaattaaactgagataaaaacggcgttgcttctttaattttaaaattaaaagtttttccatttgaaggggaaattgattgatgtaactgtaggtcaaccacgtcaataagataaacagtgtcattaataatgtagcgaggctgccgacgaaatcttgtggttgcaccgcataattgactaataaggccactatccaaaatagcaaaggcccccacaaattcccattatcaaaaaccattttctgatgcaaacgtaactgtgcactaaaggacttcataacgtaacccccttaggctaaagccactttttaacattgcttgaattaattcatcactatttttgatatttgcatacaagacgacgtaccgcgtaccatcaacaatttttaaagctaactgttgtaaagtagcgggaagtgcgagtgatcgcggtgtagttgcaaattctaaccgcatcaccttttcttccggctgcggtaattcttcaatcggcaatagccgcatcgcatctagttcataaatttcagtagccaactgttcgattaaaaaagcgttgttagtgccgacaatgatggcgccccctttttggcggtagtctttcaaccaatgaatcatccgcatctgggtcgttccatcttgaccagccaacggttcatctagcaataaaatatctggggtccgcaaaatcgcctgcacaaagttcactttttgcagactaccgcgtgacaattgatttaacggtgtattaagtgccgccgctaacccaaattcataggctaattcattaatctgaccttctaaatttcgattgctaaactgatctaattctcctagcatccgcaaataagtcttaggtgtcagtccatttggtgcgagttgttcagccatatagccaatccgcatcttcggtgcaatctccagtgtcccgcgttcaatattcgtcaatcctgctagtacgttaagcaacgtggttttccccgcgccgttttgcccagtaatcgcgatacaagcttgccgatcaatccgtaaattgagacgtttaaaaagttgtcgccgctgatatttttgcgaaaaatcacgcaattctagcactgctcccatttaacttgccaacctttactggattattttgcttgccaattagcgatgttttgcgcagccaaagctaaactcaacacagcatctttagacaaatcagcttggattaagttatgtttaacggttgcagccactgcaccaatgacagccaaaccatatgtcaacacttctaaatcgcgtttaacgagatattgatcttcataaacagcttcgtggctgtattcaaagttgactttgttttcagctaaaacaccatccacgtgggtcaccataatccgatcggtcacatcgattaataatttgtggtcatctgataacgttaatttatgatctgactctgattgataatatgtttcttctgtaatatcaaaatacttaacgaccgggttatttaaaacgccaaaatcatccaaaacagcaaaaattgtttctggatttaattgcactttgcgatcggcaattgctgccatgttttcttctaaccaatctgctaattggcgaacattatcctgtgtcatatgtgggactcctttaattaatctaaatgaattctatccctccataatacaccatccgcaatattagcgcgactgactgcaccaaaaagttactgtgacatcagatgatcatcaattacgccagctccttgtaagaatgaatagatgacgactggtccgacaaattgaaagccccgccgttttaaatccttgctgatttggatcgatagctctgattttgcggggacatccgcccaagttcggggccgatttacaattggctgtccatcaacaaagccccatagatactgatcaaagcttcctgcactcttttgtaacgcaaggacggcttgtgcattattgaccgttgcattcaacttagcacgattgcggataattgccggattggtcagtaactgctcaatttcggttggtgtcatctgcgctactttggcaatttcatagtctttaaatgctgtccgaaaggcagcacgcttatttaatacagtccgccaactcaagccagcctgatacaactccatacataatagttcaaataagcgttggtcatcatgttccggttttccccactctgtttggtaatacgccaataactcaggtgaatcatacatccaatcagcttttgtcattattaccacctcctaaattgaactacgcaaaaaggctaaaaagaattcatcctttttagcctttgggattgttatttattttttcttacttgctttttgataagggcgattttcaacatcagtcttgacgattaacacgtcacagatagctgtgcggttaacatattctgtcacagaacccatcaacatccgttcaactgcattcaagccagtagagcccatcatgattaaatcggtttgatattctgtcgggaagtcgcgtgcgataacattcttaggattaccaaaccgcacatgaatctcgacatctttcaaaccgtcattggtttggatatcatattttaaactgttgagataattctgtgcatcttcagagatttggaaaatagcgtctcctgaaagcatgccactataactccctgcaaattgcttggtatccaaaacgttcaaaatatccaagcgcgcctgattcatcttagcaacccacactgctttatttagtgctaattcagcttcttcagagccgtcaactgggacgagtattcttttatattcttgaaccatgttgttcatctcactttctctatatgcacctgttacactttaagaatataccgcttggaaaaacaattcaagcaaaaaagcgaagcgcttccgcgaacatttaattagaagtagtctttcttttttaaccaccaaccgacacaaaggctaatggctaatgacaatcctaatagcacgagaaaccctaacttactctcggctagcgggaccggtacgttcatcccccagaaaccacctaacgttgtcggaaccgttagaataattgagagtgatgttagtgtcttcataatattattcaatcggtttgaaataatatctgaaagcaaatcacttaactgtgccaataactcacgatacgttgtaatcgccttatcggacttggcaaactgcaagtcaatccgatacagtaagtctgtatgtcctgacacgcgctcaaataatggagttgccttaatttgcggaataatttgctggttactcttaagccctaaatccaaatagacaacactctttttaagagacttgagtgcatacaacaaccgattgcgtgtcgaaacatgtacattttcttccaattgttcaatctgttgcgcaacgaccgctaaagccgctaaataacgttgatagatggccgaaacactctttagagcaaccgtttcaatttgaccatccaggccttctaacgtgagtatttcatcgatgagctcggactgttgatgccccacagttaataacgtctggccactaatgattaacgaaaaaggccgcgtaatatattccgcatgatcttctgaatcatgggttttaactggtaccagtaaacaaatatgggtcaatacttcaccggtgtccgttgtaaatgtttcataccgtgcgacttcattgatatcttgggccacctcaaataacaccgctggtaagtggtattttttagcgaaatggtgcatctcatgtttagttggtgcttcaaaatgaatccagtcggcacttttttcagaggttccttcaaccaactggccctcaggtgtcatttcaaaatacgtaatcatctgctcactccactcttaatacccctatcatactgtttctccccacatactgacaagttaagttgattgcccattaaatatgctacaatattggtatcattggataaggagttgacgcatatgacacaccgcattttgccacttgaaaaaggccataactttagagaattgggcggctatcaaacaaaagacggccggacccttaaatggcataaagtcttacgttccgctagtctagcccacctaacaccacatgatttagcttatttaactgattatggcgtgcgctatgatgttgattttcgctcacctgaagaaactgccaagtcaccagacaaggtccctgccaatgcaatctatgaatccttacccgttttcaaaattgatgaaacggctagtacggcatcagaagctgatctttttaaaacgttcagtgctgatccaaaaagtggtcatgaacatatgattcaagtctatgtcgacttaattaaccaagatcactccaagcaagcttaccggcaatttttcgacttgttgctagcaaacgataaggaggaccaatccttactgtttcactgcacggctggtaaagatcgtactgggatgggcgctgttttcttgttgagtgcactcagtgttccagaagaaacgattcgcacagattacttattaacgaatcaagcttctgccgctttcgtgacccaatcgcttgcaaaactacaacaaaaaacacagaaccagtctgtgttccaaagttatcagtcattactaacggttcatcaagattacctcgataccgccaaacaagcgattgaatccgaaaatggttcgttgaaagactatttatcacacgatctccagttaagccaacacgacttagctgacctgcgcaaaatttatttagcataacccatttgtttcacatgaaacttaaaaaaggagcgtggctttgaatgcccactttaaaagaacaagtgattgaggcgagcaaaaccatcggcatcgataagattggtttcacatcggcagcgccttttgattatttagaagcaagtcttaaggaacaaaaagcaaatggtcattcgactggattcgaacataaagtgcttgaagaacgcctttatccagatttaattttcgaccaacctaaatcgattatcgcgattgctcttgcctatccaacaaaaatcatcaataagccagcgcgaactggtgctaaacgcggtagttttgcccgcgcttcgtgggggattgactaccacgatattctgcgcgataagatggaccagctgatcagcgctatcgaaacacttgctgattcagatactgaaattacttttaagccaatggttgatacaggcgaactgagcgatgtggctgttgcgcaacgtgctgggttgggcttcatcggtttgaatggtttattaattacacccgaattcggttcttatgtctatcttggtgaaatcattaccaacatcccatttgaaccagacacaccgatggccaatcaatgcggcagctgtacgcgctgcatcgattactgtccaccacaggcattaatgggcgatggccgcctcaatgccaagcgttgcttatcctatcaaacacaaaccaaagggttcatgcccgaagaattcagaccaaaaattcgcagtgtcatttacggctgtgatatttgccaacaagtatgtccgtttaataaaggaaaagacttccacttccatcctgatatggagccagatccagaatctgtgatgcccgaattacagcccgtgctaaccatcagtaacaagcagttcaaacttcaatttggacaccttgctggttcgtggcgtggcaaaaagccacttcaacgcaatgcgattatcgcactcgccaacgtgaaagaccgcaccgcgattccgaagttactcgaactcatcgatactgatccgcgccctgtcattcgcggcactgctgcttgggcgctcagtcaattagtgcgcgatgtcacgcctgaaattttagactttctagaaacagccgcaaagcgtgaagaagaaccggaagcccaagttgaattcgacaatgcacttcaaattctaaaagaacgttattcagagaggtaggtccaccctagtatgtcagaaagtgctccgcaaaaaacagtccttacgcagccattaatccttttgatggcttttattaccggcgttgccgtctccaatctatattacatccaaccgattcaagcactcgtagcgaccactttccacgttacaagtggtgcggtcgggactgttgcaatgttgacacaggtcggttatgcacttggcttgttgctgattgtcccgtttggtgatgtgatgagccgttaccagctcatattacggatgcttggcttatccttactatccttattagccgcttacctagcacccaatttcattttctttgccttgactggtttgatgattggcctcacctcagtggttcctcaaatcatcattccatatgcagccgtcctcgctcaaccacaaaaacggggcgcagtgctcggcaccattctcagtggtcttctaatgggtgtgctcctatcccgaagctttagcggcattattagtagttacattcattggcgttgggtgtatctcatcgctacaattgcgattgcgcttttaatccttctggcagccctcaaattacctaaggattcccgtccaaaaaacgggccaagctactggcagacaatcagttcaattccagggcttatcgcgcaccagcggctgttacgggaagccgccatcaacggttttttcatgtttgggacacttagtattttctggtcgacactcattttctatatggccagtcccgcctatcgtctcggtagtggtaccgttggtctattagcaatccttggtgcggctggtgctttagctgcaccaattatcggtcgcttagccgatgctaaatcacctcgctttattatcgccactggcttattcatgatgaccatcagttatcttttattcttattctgggggcatttcatgccgattctaatgctcgggattgttttattagatgtcggaaaccagtgcggtcaggttgccaatcaaacccgggtccaaatgcttggtgaagccactagtagtcgcaacaataccgtcttcatgtttgcctatttcatgggtggtgcttccggttcattctttggcgccctcgcttggagcttcggtggctgggtcgccgtttgtctcttagcgctagcttatcaatgtctcgctttaatcgcccactttattctttatcgtcctaaatcaacaggttaattaatggccggtgtaacgttctcaattccgttacaccggctttttgatacctatcagtaaagcgtattcattgacagttgcatgttacgtatctaacatagttattatatagcaataaatttccaatcatcacaataggaggttccttatgacacattatctaacgtttgatcacgtttcaaagctctatcgcggtggtaacaaagccgttgatgacatcagttttactgtcgacaaaggcgaattcatttgtttgattgggacgtctggttctgggaaaacaacaaccatgcggatgattaatcgcatgattaacccaaccaaaggaacgattaccttagatggtgaaaatctcgctaatgtagaccccgttaaattgcggcgaaaaattggttacgtcattcaaaatattggcttaatgccacacatgactattcaagataacatcacaattgtccctaaactcttaaaatggtccccagaaaaacgccatgcaaaggcgctcgaattactaaaattagtggaaatgcctgcggactttttagaccgttacccaagccaattatcaggtggacaacaacagcgaattggggtgattcgcgcacttgcagctggacaagatattattttgatggacgaaccatttggtgctctcgatccaattacgcgtgaggcacttcaagacttagtaaaacaacttcaatcagaactcggtaaaacaatcgtctttgtcacccatgacatggatgaagcactcaaattagcgtcacgcattgccatcatggataacggccaaatcatccaaatgggaacgcccaatgaaatcttgcgaaatcctgccaaccaattcgtcgaagacttaatcggtcacgatcgtttgatcgaagccaaaccaaatgtcgaaactgttggccaaatcatgcttaaaagtccagtcgctatcacaccaggtaaatcattagttgatgcgattcgcttaatgcgccaacgccgcgttgataccttactggttgtcgacgaaaaccaacatttaaagggactcgtcgatattgaaaatatcgaccatcattacaaagacgcaactagtgttggtgacattatgtctaccaagattagttacgtgaacgaaaatgatttggtccgggataccattgaacggattcttaaacggggctggaaatacgttcccgttatcaacgatgatcatcaacttgttgggattgtcacccggacagccctagtcgatgtcgtttatgatgctgtctggggtgatactgacgaatctgaagcagaatccgaccaacaatagaaagggaggaatcgatgatgctcacttttttaacagaacatggctctgatttactgattaaaacttgggaacaactctacatttccgcaatcgccttagttctgggcataatagttgcggtgccccttggaattgccctcacccgatttcctaaaactgccaaagtagtgattgccattgccagcatgctccagaccgtcccctcattggcactattggctttaatgattccgctctttgggattggcaaagtaccagcaatcatcgccttatttatctactcactactccctattttgcggaacacctacatcggcatgaacgatgtcgatccgattctaaaagatagtgctaaaggaatgggcatgacgccggtacaatcaattatgcaagtggaaatcccaatggcgacccccgtgattatggcaggaattcgcctatctgcggtttacgtgattgcttgggcaacccttgcttcatatattggcgctggtggtcttggcgacttgattttcaacgggttgaatcttttcaaaccggatttaatcatcggcgggacaattcccgtcacattgttagcattgctagtcgattttggcttgggccggttggaaaaacaactgacccccgctgcaatcagataaggaggctcctatgcataaaatacgccgattcattacgagttgcggattattagttggcagtctcctcctgttaagtggctgtcagtcacttggcatcggaaaccgtcaatcacaaacaattcgcattagctcttcaagcaccactgagtcacaaattctcgccaatattctgagcgagttgattacccacgaaacacaaaataaggtcactttaattaataatctgggttcttcaacggtaacgcatgaatcactaattcgtggtgacgccgacatagctgctagtcgctacgctggaactgaacttactggtactttaaaaatgaaacctactaaagatcctgaaaaagcccaaaaaatcgttaaaaaagctttcaaagatcgttacaaccaaacatggttcccttcctacgggtttgcggacacctatgcctttatggtcacccaggaaaccgccaagaaatatcatttagaaaccgtcagtgatctcggaaaagtggcggatcaactaacagctggtgtcgattccgtctgggtaaatcacgaaggcgatggctatcccgcatttaaagaaacgtatggctatgatttcaagaaagttgcgcccatgcaaatcggactggtttacagcgcactggcggctggtaaaatggacgtcgttttaggttactcaaccgatggacggattaaaagttatgacttaaaagtcttaaaagacgatcgccgcttcttcccaccatacgatgcgagcgtggtcgccactgatcagattctcaaagaacagccagcactagcgccccttttacaccgtctagatggcaaaatcgacctcgacaccatgcaaaccctcaactttaaagttgataatgatctactagaacccgcagtagtcgcaaaacaatttcttcaggaacataattatttccggaaaggagccgctaaatgactaatttaaatacttggcaacaacttgtctattatttccagcataatggcagttatgttttacggcagtttagtcatcattttttgatttcgatttatggcgttttacttgccgcgttgattggcattcccttggggatttttattgcgcaccggaaaaagctcagtaatgttataattggggtagcgaatgtcatccaaacagtgccttcactcgcaatgctctcaatcattatgcttggcttggggcttggcacacgaaccgtcattgcgactgtctttttatactccttgctcccgattatcaaaaatacttacaccggtatggagaatgtttccgataatattatcgattccggaatcgggatgggcatgacaaattggcaactgttacggatggttgaacttcccttatcattggccgtcattatggcggggattcgcaatgccttagtggtcgccatcgggattacagcgattggcgcgtttgttggtgccggcggtttaggcgacatcattattcgcgggaccaacgccactaatggcggcgccttaatcttagctggtgccctgccaaccgccctgatggccattatcgctgatgtgacgttaggctttattcaacgccacttagaagctccacaagcacgaccttaaatctcaacattaggaaggtgtcactatgaaactgtatcaagcattaacccaagtcacactaaacacacaaatggttgacgatttacctgattttcagattacaaccgttttagaccaaccattgaactttgcccctactcagctttaccattatatcgatgccgttttaaagagcggttctcgtcacgatgaaaataacctgttatatgtcacagacgcgatttttatcactgaaaactacaactttaaacaaactgaattcgcggcacttgccacaagcttcgaagaacgggtaacattagcgcgtaaaattgtggccgatctcaaccgccacgtctccgtcaatctcgatttagtgcaacatgaattccaactaatttttgtcgattagcacgactgccccaggcgatgttatttctacatctactggggctttttttattgaaatgaatgaacaggagtcctcactttgccaaatgcacagcgtcaaaatagcgcgctttataaactcaatcgtcccgccaaccaactaacaacggaacaacaagcactacaagaacaagtcattcaattttgtttggcaaacgcgcacgccgaacacgccaccttcttgattcaaggtgcggccgggactggtaagagcgtgattctcagcagtgtcttcaaggtactgcagacacttgcgcgccaaacacccacctcgccactctatggcagtcaaaacgttctattggtcaatcatccagaaatgctaaaactctacaaaagtggcacaacaacggcacccgttttattgaaaaaagattttcaacgcccaacgacattcatcaatcaagcggctaaaaaccaccaacttgccgatatcgtcctcgttgatgaggcacacctactgttaaccaaatccgacccctatagccacttcaatcaaacaaatcaactcgatgaaattcgccgacacagtcggatcaccattctgatttttgatgaacagcaagtgcttaaagtgaagagcttctggcaacagcaacaactccgccaacgaattgaagctgctccccatcagaccgcgcaactaacccatcaatttcggatgcaagcccatccaagtgttgaaaattgggtgcaaacctttcatcaacaacaagtcgctgccctgccacatgatccacactttgaattcaaaatattcaccgatgccaatgagctctatcaaacgattcgctttaaaaaccaaacgagtgggcttgcacgcatgctagctacttacgattttccagcaacactcaatgatggtcacgatcacttcgttgagacatcgacattcaaattacgctgggatcggtatcagccaaccgctaaaacctattgggcagaacgtgaagatagtatagatgaagtcggatccgtgtacaccattcaaggctttgatctcaactatgccggcgtcatcatcgggccatccgtcacgtatgatccacaaagtgagcggctagttattcatcttgaatattacgaggaccaagccgcatttgccggcgcagcacagctggctgatcctgaagccgcgaaacagcaaattattcttaatagcctctacgttctaatgagccgcgctagaaacggcctttacctctatgctgttgatcccgcacttcaggccaaattgctcagcttatgacaaatcgattttatttcccggggaataagtcggttttctgtctatctctatcgaaaacaagtaaactgtaagtagagattttaaactgataaaggagtgttttaatatgtctaacttaacgagttcatacacgctcacaaacggcgtgcaaattcctaaaattggcttcgggacttggcaaacaccagacggtcaaacagccgtagctgctgttgaagaggcgctcaaggcaggttatcgccacattgataccgcccaagcttacggtaatgaagggagtgttggtgaggccatccaagctagtggcgttgatcgttccgatttattcctaaccaccaaaatctggaatagtaatcacacttatgatttaacaatcagctcttttgaagaatcactcaagaaattacaaaccgactacgttgatttgctcttaatccactggcccaacccaattgcctaccgtgatgattgggaaacagccaacgccgaaacatggcgtgcaatggagatgctctacaaagctggtaaagtccgggccatcggggtcagcaacttccgtgttcgccatttagaagcgctcaaaaagactgcaacggtacaaccaatggtcaaccaactcttcttagcccctggcgaattagaacctgaaactgcccaatactcacgtgaacatggcatgttattagaagcttatagcccacttgggactgggaagattttcagtgtgccagaaatgcaagaattagcggacaaataccaacgctcaattccacaaattgcactacggtggtcattacaacacggcttcttaccattacctaagtctgtgcatgctgaatacatccaacaaaatgcccaagttttcgacttcgaattagccgatgaagacatggctgcaattgatgcacttgacggcgtcgttggacacgcgcaagatcctgatactgcaacattctaaaactgtttaaaagccactaacacagtggcttttttcgatacagatcaacgtcaaaatgtgacaaagcgtattttagtttagatatttaacaatttagtttacctcttccctaaattatggtattttcattattattgaatccgataaaatcggactaaagcccgacgttatttaccgttttaagcttgagaatggtaaaatagaactagttagttaagaaatggggaattattttgtcaagtggtgagttattcactaatctatttgttatgttggtcaccttctttttagccgccttcttcgtggccgctgaatttgcgctcgtccaaacacggccaagtgccttagaagatgccatccattcaggaaatggtaatcctaaaaaattgaatcttgcgcttaaaatgacgcaaaacttaaacgaatatctctcaaccacccaagtgggggtcagtgttgccgggattattttagggtggattggtgaatcaaccgtcgaaaccattctagtcgatctgctcggtctcactcacctgatttcaaatggtggcttacacatcatcggcgcagttgccggcgtgttagtcttaacctatttagaagtggttttcacggaaatcgtgccgaagaatattagtattgatattccaatgcagatgttgatggctgttgctaagcccctccattactgtcatattatcttctatccatttgtttggttactcaacatttccgcaacgggtgttgtgaaattaatcggcttttcacctgctgaagaaggtagtgatgtgctttcccaagcggaaatcattagcctctctaaaaatgccgtcactggtggtgaattagatcgcaacgatttagtttacatgcaacgggcctttgactttaatgaccggattgccaaagatgtgatggttgatcgcacaagtctctacgtcgtcgatatcaccgataccgttaaagacgtcttaaaagactacttacaacaaggctttagccgcttcccagtggttgctgaaaatgataaagacaagattcttggttacgtctacgcatatgatttagtccgtcaggcacaagtcgacgattcaatccgcgtcagcaagttactgcgttcgattatctccgttccagaagcaacccctattcacagtttgttgaaccaaatgatcaataagcaaaccccaattgtggtcgtcgttgacgagtacggtgggacgagtgggattgtcactgataaagatatctatgaagaactattcgggaccgtcaaggacgaaattgacgatgtttcagatgaatacatcatcaaagaagacgataaccgttaccgtgttagtgggaaaacgacgctctatgatttcgaacgtttcttcaagactaaaattgatgccttcgaagcctcagatagcgtgaccctggccggttatgtcttagaaaacttcaccgacttacaacaaagtgcggtcattcatatcaatcaattcacattaaaagtggtcgaattcaatcgcggttacatcgactggtttgaagtctccagcgaaccacaaaataatacagccaacaatacaattattgaaaccaattaaaaaaagagtgtgctatcagccatctcctgaggattaaccacaaggagatggctaatagcacacatttaaacaaaaacagccttgcgcaaatgcgcaaggctgttttttaatttcgttatgctaaataatcacgactccagatgagccccattactttttcgccggtgtgcacgccgaccacaggaccaatgtgactcgtttcaatcggcatccctgggaatgtttccgtcaacgttgcgacccactgcacactttcttctggattattaccgtcaatcacgctaacgcgtacgggatagtcaacagattcgactgctgctttgaaatccgctaatactttttgaaaggcccgtttcttggtccgttccttcgttaaggcaacaatttggccggcatcgttaaaacttaaaatcggtttaatccgcaaaagattcccgacaaaggccgcactattcgaaatccggcccgttcgcaagaggtggcttaaatcatccacaacgaaataaacgcccatcgttgctcgtaaagctaccaatttcggcatgatagttgcggcatgttcaccttgggcaactaaccgcgccgcttccaaggccaagaacccttcaccggcactcgtaatcttggaatcaaaaggatacacttcgatgccttcaaccgactgtgcgtaggcggttaggttattgacaaagctcgtaataccacttgaaagatggatacaaatcacttcatcgtagcccgcttttatcaattgatcaaaaacctgttgcatctgacccattgtaatttgcgaagtcgttggtaatttttcagtagtgcgcattttatcgtaaaatgcttcactcgtgatatcgatattttccaaataagtttgttgtccaaaaataacggtgattgggaccacagtaatattatggtcggcggcaacttgtgaatctaaatacgccgcactatcagtcacaattgctgttttcatgtcaggctcctcaataaaactgtttttgtcattatcccaccaatgtggataaagtacaaatgaacaacaaaaaacgccggaccactttctgcccgacgccacagttattaatgagtcattgattcattctcaaatacgacaatggagatgtgcccatcaattaagccactgttattactcaaggttaacatttgattcttttcgttaacgtctaatacttcatgttcatcaaagtagccagctgcataatctttgtagtaaacagcccctagatttgattcaaattcatctggataatctttaatgtcagcatccgctggtactaatagcaatctaaagttcgtatccaacgagcaataaccaacgtttgaaaatggaccaacaccgtcatctaagtccaataaaattttttgacccggtgtcatcttatccttgattttcgcaactgctgcaggtgttatttttaatgccatatcaatcatccctttcatgctttcagtctaccgccgttttaaatttgacacaatctatctgctcagccggtgtgctacaataggcttaaccgtttatttaaggaggtcattatgcttttttatcggtattcatactttagcaatcagaatgatttcgaattctatctcaaactaagtctgtcagtgatcatcgccagtttaatcatcatcttcttcgttcaatatctccgccaccgttcagattcgaagtaccgtgacttactaatcatcttcggcttagttgggattttactcgccggcattcaatatacacggattcaacagcttaacaccgcccactcgcaacaagcccagatggcgcaattcattagaagtgtggcgactgcgcagaaagctagccttaaaaccgtcgcagtcaacacgacttcgcttcagcaaaacatggtagtgcgcgtcggtcatcaaaactaccaagtcatatttgataacaattttactagttatcaactccaaaaagctcagttgattagccaagacatcacctatcaagattaaggagtttactatgccatcttatttcgatattaccattaaattaattttcggtttcttctgtttagtgttacaaatcaacctctctggcaaggggaatttagcccctagcagtgggattgatcaactccaaaattacgttcttggggggattgttggcggtatgatttataatgccgatatctcgctcttacaattcttactcgttttactcatctggaccttaatcgtcttcacaatgaagtttctaaccactcacaatcgctggattaaacgctgggtaattggtaatccacaaacaattatcaccaacggccacattgatattcaaacggcctctaagaatagtttatccgcacaggatctgtcgtttaaactccgaattgccgggattagcgatattcgcacggtcagtcgcgcaatcttggaacaaaacggacaattaaccattacgcaaaaaggcgacgccacgattaaatatccgctgattatggacggccagattaattcagaagcacttgaattaatcgatcaaactgaagaatggctcctcgccgacattcaacagcaaggctacagtcttcaacaaatctacatggctaactacttgaaccatgaaatcgtgattacgccctattaaaaaagatgacccgcaaaggtcatcttttttaatgtcgtactctttggagaagcgttgcaaccaaccagacaatcgccccgccaattaaaacaatagtgcttgtcttcaaaccataatccagaacagccaacccatagtcggtaattgtttgattaaaatcgcccgctttttgagcaatttgttcaacaatgccactatatttaaacgcagccgcccctagtgccaagaataagccactccaagcaaaacttgcaccaacactccctaatacataccggaattgaccacttagtccccattgaactagtacaagaacaattcccataataattgcaacccaggttaagatattgatcacatttctaacaaacaacatcttagtcgctagtggtgctaagtaaggtgcttcaatttggttcgtgaggtattcttgtagtggtggttgaaccgcaaccactgccgttttaattaaagattccgtcaacgcattttcaggcacaactgcttctaaatgggctgcaagttgtcccatcatttgtgctgtgggtaacggcttttcttgtcctatataaatattatgaacagttttctttaaatcggcccgcacatcagattgggtcagtaatttgacttgtacttcagttggtagcccatttttttgtgccgcatctaataaaacaacgttaattttatcagtcatcgcagctaacgtcttcggttcactgagctgttcttgcgtaaatgattctctcaaaactgtccggctgagaatcatgccactaatgccaaggaaaacgcaaagaaagattaagaacgtcaaaaagcgacttaaacctcgatgtggtcgcacgcttggttgattttgattcaaacgactaattggttccattgattaaacaccctttctattcacgaaccctattaaacttcaagactaggattcttaatcattaaatgctaaagtgaacttatcagtcacaggaggccattcaatgttaaaaaatttaacgattctctatatttcaattgctggtaatacacgttcatttgtaacggatttacaggattatgcggcgcaacaacatgctaataacccagcgttaccaaccattaccctcacagaaatttcggatgcgaccccctttaaagcggagaccgaaccgttttacgcgttcgttccaacttacttagatggtggcaacggcattgataatggcgttaaagaattaatgaccaatagcttaggcgaatacatcgattatgcgcagaacgcacgcctttgttatggagtaatcggtagcgggaaccgcaacttcaacgaacaatattgcttaactgctaaacggtatgcggtacaattcgatgcaccgtttatcgccgattatgagctccgtggcaatgcgaaagatgtcgcgcggatttataccttaatggtcgctaacgcgcaacagcatgcctaaaatttaagattagccggtaatgatgtgattaactcggtgggttgttggacaatttggacagcacccgcctttttgagttccgcgattgtgccaaacccataactaacaccaactgcattcatcgcgttttgcttagcgcccaagatatcattttggcgatcacccaccatcagtaatggtgcggtttgtggtgatagaccaagttctgataatgcgtaagtaatgacatccgcttttttgacccgcgttgtctcatcaacacttgctccaaaaacaccgctaaagtaatcacttaactctaaatgatcaatgaccttcttagcgaatggttctggtttcgaagtcgcaattgccagttgtaaatcctgtgcttgcaatgccgctagggtttctcgcatgccaggataaagttgattttcatacaaccctttaggcgcataataggcttgaaagactttaatagcttcttgagtagcagctgcatttaaaccaaactcacgcataattgtttcattgaggggtggcccaatgaatgtgaccagttcagctttggtttgcgtcggcaatgataactcctcaatcatatattccaaggcgttcacgatgccttcttgcgaatcggctatcgttccatccaaatcaaataaaacggtcccctttgtcatatcaatcatctctcgatctcttataaagtaccttcattttagcatactctttgacccttaaactttccttattgcttttttcataaatctataaacctctggtcacaaaatcttcacaaattcccattatagtattgagtatagaaaagcgaatcttttctatttcatactacttaactttttcattttactcctccaaagtaaaattaaggtagacgcaatctaccacgcacgtattattcccccaaagtaatacgtgtaccccctactcctttttagatcttcggatctgctagaaaccagtctccccaaggctggtttttttgtgtccccatcaaaaaagccgccagaacagtttacgttctggcggcttttctcatttttaaagtaggtactgttgcatcagttcaacggttttgagttgggcatcgtctgatactttatgttgcccattttcttccgtcgttaatgtcactaatgcagtggctgaacttggttgcgcctgaatttcggtcataaaatctgccgtgaattgatatggcaccatcgtatcagcagttccatgatagaaatgcaatggacgtcctgccaagtgatcaacgtgcattgataagtcatacgccgctaaccgtgctagggtatcttcaatcgcatcttgatacttggtttgcaaggccgttggtaattgactaacctgccatttagcaagtgcgacaggcattggtgcgccaatcttatcaacgccaattttgacattcggatatcgggtgagaatcgcatcggttgtaatgccacccatcgaagtccctgtaacaccaatccgttcaggatcaactaagccttcagcgctcagtgttgcaaccagttcaccaaactctgtgaccgactgcatcacaatgtcccaaaattcaaacattaactcagaaaagagctgactaccatgtcgtttaccatgatacttcgcatctggtaagaccacgcgaaaaccagccttggctaaaaagtgggcgaccattaattctgactctttacggtgcgtccaaccatgatatacaaagacagttggtaataccgctttttcttgaccacttggggccacaatcaacgtactgactgccccaatttgccgttcttcagtgctaatcatctcaaatcctcctcaattgccatttatttcccgggtaatattaaccgaagaatgaacctgtaatcttaaaacggcgtttgatataaatccgcacgccgattaagagtgctgcaattacgatttgaacaagtggtggcaagactggattcaagaaacttggaatcaagattgtcacaccgtatgccgcaacaaaggctagtgttaagccgattacaaccaatgccatcttccaaaatggtggccgttgttcttttggcatttgcgtatagcgcattggataagtcatgatgatccccgcaagcgcagccgtaatgacaattgatgtaatcccaatgctggttgctgaccccttcgttgagaaataagccgcaattccgttaaaggctaggtacataattaaaaagattaagccgttatcaagcatttggagttgaagtgatgtttgcttaggacgttttggcgcgtgcaacaattgatcaatcttggttgtcactggaccatatacttgtgttgcaggcttgcccttatgttgttctgctaccatttctggtaacatttctgccaagatttcagtttggcgttctgctggcacttgttcggcatttaatgcgcgtttgaacttaaataaatagtccgcatttttcttactgagttttgcttctaactcttcaatatcaactggttctggggttactgctggttgttcgttcttagccaattgtcttcctcctcaattatcattaaacgttaaatctaaattcgatgatgtcgccatcttcgaccatgtattctttaccttctaaacgtaaacggccagcttctttaacagcttgcattgaaccgtattgatctaaatcagcaaaagaaactgtttctgcccggataaatccgcgttcaaagtcggaatgaatgacaccggcggtttgtggggccttcatgccttgacggaaagtccatgcccgggtttcttttccaccagcggtaaagaatgttgctaagcctagtagatgatatgaagcacgaatcaatttatccaaccctgattcagtcaccccttcggcttccaaaaattcagccttatcggcatcatctaatgaggcgatttcttcttcagttcttgctgagatggcaattacttcggcgccttctttagctgcggacgcttgaatttgtttaacataatccacactatcaggatcagccatggcatcttcagcaatatttgcaacatataaaaccggttttgatgttaataagaagaagcctttaactaacttcgcttcatcttcattaaattcgattgaacgtactgagccgccttcttcaagaacaggcttaatctttttaagcacttcgaattcggctaaggcgtctttgtctttcgtccgcgcaatcttttcaacacgcgcataacgcttcgtaacactttctaaatcagctaagctcaattcaaggttaattgtatcgatgtcgtctaacgggtcaacagttccggtaacagaggtaatattatcgtcgtcaaaggcgcgcacaacatgcacaatcgcatcgacttgacgaatattctccaagaacttgttcccaagcccttcacctttgctagcccctttaacgatcccagcaatatccgtaaattcaaaagtcgttggcacgatctttttagccgggataatttcttgaatccggtctaaacgcttgtcagggacttcaaccatgccgacgttagggtcgattgtggcaaatgggtagttcgccatttcggcgcctgctttcgtgatggcgttaaataacgttgattttccgacgttgggtaatcctacaattcctgcggttaatgacatagttttttacactttcctttactttaaaaattagtttggttgggaccttgttgcatctcttgatagtggggttcatccgcaacaacgacttgtgctgcaggcaccaaattcttcttaagtttcttttcgaattcacggcgcggtaataagacggcgtggccgcaccccatgcacttaattcgaatatccatccccaagcgcaccacttcaaagcgattggtgccacaggcatgttgttttttcatctgaacaagatcgcctaatgtatacatctagctcgactcctcactttaatcgatattcacatctagcaatgcaagaatccggtttaaatcatcgactgtgctgtaatcaatctcaatctttccgcgacccttgctgttaatcgcaatattgaccttggtgtcaaatttatcgaccaattgattttcactcgcttgaatatagggtgatttaatcttggtcttcgtcactttcgcagctttaatctggttcatctggttaattaactgctctagttgtcgcaccgttaagccttcatcaatcgtgcgtttcgctaatgcactaatctgactttttttcttcaatgataataacgtccgcgcctgtcccattgaaaggtcaccattttgtaataacgtcttcacgtcattgggtaaacccaataagcgcaagtaattggcaatgtatgggcggctcttgcccaaccgttctgatacttcagcttgagtcaggtttaactttttcaagagtgtatcgtaagcttgggcttcttctaacggcgttaaatcttcacgttgcaggttttccaagaccgcaatttccatcattgcggattcatcaaactgccgcgtgatggctggtatcgctgttttaccagctaacttagacgcacggaatcggcgttcacccgcaattaattcgtaaccattaatacttttgcgaacaatgattggttggaaaacgcccgacttcttaattgacgctgctaattcagccaaagccgcttcatcaaatgtcttccgcggttgatagggatttggacgaatatcatcaagtgcaatctcttcaactaattcatccgcccggtttttattagggccttcgaacgctgaaaatacagcatccaaaccgcggcccaatccttttccatttctagttgccatgagctgctaacacttcctttgccaaattttggtaaacttcagcgccccgtgattttggatcataatcaatgattgatacgccatgactaggtgcttctgctaagcgcgtattccgtggcacaatcgtgtcgtaaacccgatcaccaaaatacttacgcacttcttcaatcacttgagcccctaaattcgtccgcgcatcatacatcgtcaacaacacgccttcaatcgctaagtttgggttaaaatgtttttgcaccaaacgaacggtgtttaacaattggctcaatccttctaaggcataatattcactttgaactggaatcatgattgaattacttgccgtaaaggcattgattgaaagttgccctaatgaaggtggacagtcaatcaaaacgtaatcataatcggctaagactggttctaaccctaacttcaagcgcatttcacgcgccatctgtgatgttagctcgatctctgcccctgcaagttgaatcgtagctggaacaatgtctaagttcttatgtgatgttttaataattgtttcttttagtgggaattcatcgaccaacacatcatagatatctttttcgacttgggatttttgaaccccaatcccgcttgtcgcattcccttgtgcatctgaatcaatgattaacacgtgattgccagcatccgccaaacaagcgcctagattaatcgtggtcgttgttttaccaacgccacctttttgatttgcaattgaaataacgtgtgccataatgagcctcccttattgctttggaatttcgatcgtaatccgataaacatcatcttgttcttcttcggtggctttgacggcaatcccgctttgttcaaccatttgaaccgactttttgatggtgttgacggcaatgcgtgtatcatgggcaattgctttttttgctttatcgttcgcttttttagccttcgtggtagcttcttttaaactgtcatcggttgcatcaactgtctcttcagttgattctggttcaggattcaacgtcttgttaaccagcgcttccgtatccttaaccgttaattgttcagccaagatttggtgtaaaatcatttgttgcttgaattcatccaaccgtaaaaggctccgaccgtgtcgttcagaaatttcatgattcatgatggcttcttgaacgggttgtgagagtttcaatagccgcaacttattagcaacaaaagattggctcttacccatcttttctgccaagctggcttgtgtgaagtcgttcagcttcattaagtccttataagcttgtgcttcttcaacggcggttaattcttcgcgttgtaagttttcaatcaaggccattgaagctgtttcgtgatcatccatagtttgaacaatcgctggtaattcagcccatttgagggtttgaatcgctctaaaacggcgttcacccgcaataatttcatatttttgatcttcatattcacgtaagataatcggttgcaataagccgtgttgttcgattgtgcttgctaattcggcgatattgtccgcattaaatacttttcgtggttggaaccggttaggcacaattgctgaaaccggcactttgatcacttgattaatacttttatcgtcttttttcttattaaaaaatgagagtgccattatttttcctccttagccattaacggttttttaactggcacaccagcccgccgtggatacttggcaggtgtcggtacaaccttatcaattacgattagatgtcgttgatcatctgtttctggtagcgtcaaagcaatgtcttgtgcaaattggccaccaagtgtttcgattgcatagttggcttctgccaattccgtttcaccttgactcgcttttaatgcgataaactgcccaccaactttaacagttggtaaacagaattctaccagtacatttaatgaagcaacggcccgggcagtcacaatatcaaactgttcacgatatggactcttcgggttgctgaacagttctgctcgatcatggaccaacgtcacatcagacaagcctaattcacggaccaattcttctaagaagtgaatccgcttgtttaatgaatcaacaatcgtaatcttcaattgcgggaataaaattttgattggtaacgatggaaaacccgcgcccgcaccaatatcgcagatcgtaaggggttcagtgcgtagtttttcaagatacaaagttggtgtgacagaatcgaagaagtgcttgagataaactgcttcttgttctgtaatggctgtcaaattaacttgttggttcacttgtacaagccgtttgaaatacaattcaaactgatccatttgtgcttgtgaaacttgaatattgtatgtttttaacgttgctgcaaaacccgctggtgtcattatttctccttaactatgctttaaagtaggcgtttaattcgtggaacattattgtttcacatataccttttagtttaacgtacttaccctaaaaaaacaagattcttcccagttttcagattatcgtttcatgtgaaacataataatcggtaatttaagaacaattatcgcctttttcaagcgaatcattcagtaagaaagcacttttgtcatcgaacagttggtgtgcatcatcacaaaggcgaactatcgcgattatttaagaatgttatattcgttttttacttaatttctaattgaagtcactattggcgtgtgctaaactaaatgttaactaaattttaacaattatcttggagggacactcgtggcagatatacactcaaattcagcacagccaattaatccaaatgaaaatcttccccacattaaagcagcgattctcggcttacaacatcttctagcaatgtattctggcgatgttttaattccattacttgtcggggctgcattacattttaatgccgctcaaatgacttacctcgtttcagtcgatattttcatgtgcggggttgcgaccctattacaattaaaacgaaccccactgaccgggattgcattaccggttgtcctaggttgtgctgttgagtacgttggcccgttagccgccatcggcactaacagccaactcggaattgacgttatgtacggtagtattattggcgccggaattttcatcttgttagtttctggcttgtttgcacgtttgcgttggctcttcccaccagttgtcacagggtctctcattacattaatcggattcacattgattcccgttgctttccaaaacttaggcggtggcgatgttgctgctaagtcgtttgggagtacaccaaacttaattaccggtttttcaacgattgccctaatcctgatttttagtatctgggggcgtggcttcatccaacaaatcgccattttaattgggattattgctgggaccttaatcgcagctgcgattgggattgtgtccttagatccagtaggtcaagcaagttggttcaaattacctgaattattctacttcggaacacctcgttttgaatggtcatcaatcgtttcaatgtcattggctgcgttaacgaccatgattgaatcaatcggtgtcttcttcgcccttggtgaaatcgttgggcgcgacattactagcaatgatcttaagcggggcttccgcgctgaagggattgccgctatcttagggggattgttcaacaccttcccttactcaacgttctcacaaaatgttgggattgttcaattatccggtatcaaaacgaaaaaaccagtttactactcagcattcttcttaatcatcttaggattattacctaagattggggccgttgcaaccattattccaagcgctgttttagggggcgcgatggtcgttatgttcggcactgttgggattcaaggcattaagatgttacacaaagtcgatcttgatgataaccgcaacttactagtcgctgccgtttcaatcggcttaggcttaggggtagcaattcatccaaccttgctccaatcactaccaacgagtgttcgcacaattctaggcaacggcttagtagtcggtagtctcagcgctgtcatcttaaacttactattcaactatcgttcattaattgcagcaaaacatgctgaacaaaaataaatcaaaaaaagtgcctacaaatttaaccgtttgtgggcactttttttgtctattcaatttcagttgtccgaatacttctagcaagtctatttgtcatttcaaacagctgcattaattctggcatgctaattttcttatctgattcagtaatacttttaatgtaagttccacacgcctgctcaaatcgacgataaattgattctccagcgggagaaactgctatatcaacaattcgacgatcatcctgtttgccatattgtttgctgatatacccctgatcctctaatttacgtaatttatttgaagatgctgcggtagatgtttttaatacttgtgcaatcttactattattaatacctttatagcgttttaatgtttgtaaaatacgaatttgttcgatggtaactccgtcttcatttgaaatttgactaatgtttgctgaaatttgagccatctcatgatagaaattaatcaactctaatttatcagtcgattgcgctatagaattcatcattcctcctccgtttcattcataatcctttgataaaactggtgccatcggctaaaatactgttgcaatgagaaacagtcgttaatcgtttgccgggcatttcgtgaatatgtttcacgtcgcatctgactacctagaaaatcactgagttgttgaactaagccagcgtcatctcctggtgtcaccaaatccccgttcacatgattctcaattacttgtggaatgtccccgacattcgtagctaaattgggaattccataagccatcgtttctaaaattgccattggtaagccttcttgatatgtgggcaataggtgtaacaggctttcttgaataacggtattgcgatccgccaaagctaaccagccaccaaggcgcacattggttaactttaggcggtctatttcttgctggaccttcccctgttcaccatcaccatacaacgtaaattgaatatccggaaaacgggattgaatcacccctgctaattttagaatatcgtaggtgcccttacgttcgcctaagcgccccagtgtgataatttgtttagactgactatggtatttgtattgcttaggtagttcaaccgcattagcaataatcgtaatcggtgtttgcgtaagtgtttggtaaaaagttgcccattcagtgcttaacacaacaatgccatccatagccacggaaaacaatgttaatattaattgaaattcactatagattcgcattatattaactatttttggatataaataaatttttaaatatctttagaatattctcataaaactaaagtaacgatgttatcattctatttctccctcccattattgtcatctaattaacgaatatcagttaatatgcccatcaaaaaaaccatcataattaaagtttttactttaattatgatggtttttttaagtatttcatttacgataatattcactatttattaaaaatagtcattactattggtccgcatacgaaattgatgagaacttattaaacgttttgacaaataataatttgactgtccctcgtgcacccgcacggtttttttcgataatcacttcaacttctccaacgtccgcatcatctgactgctgtggcgctggtgctggcggattgccaccaccgaaatcatcgccatcttccctaggttcatcgcgatagtaatcatcacgatataagaaagcaacgatatcagcatcttgttcgattgatcctgattcacgaatatctgaaaggactgggcgtttatcttgtcgttgttcaaccccacgagagagttgagagagcgcaatgaccggtacccgtaattctttagccaatttctttaattgacgtgaaatcgccgagacttcttgttgccggttttcttggccggaaccttcaattagttgcaagtaatcaatgacgattaagccaacgccccctttttccttcgctaagcgccgacatttcgcccgaatttccgccattttcacgccgggcgtatcatcaatatagatattcgcttttgaaaggctccccatggctacgattagattctgccattcaagttcgtcgagttgcccggttcttagatggttggcgtcaatacttccttctgcacacaacatccggttaacgagttgttcagcacccatttccaaactaaaaattgcaatattctcattggttttcgtcccgatattctgagcaatgtttaagacaaacgcggttttccccaccccgggccgggccgctaaaataatgagttcatcttcatgcaaacccgcagtaatcttatctaaatcgcggtatcccgttgatagacccgtaatgtcttcttcattttgatataacttatcaatttgttcaattgaactcgttaagacatctgaaattgatttgaacccggccttattttgccgttcggaaacatccatgatttccttttcagcggtatctaaaatatccgtgacgtcttcatcttgcgcgtaaccctttgccacaatattttgagcggtttggattaaacggcgcagcattgctttttcagagacaatcttggcataataaactacgttggctgccgttggtacagcctcagccaactcagctaaataaccaataccaccgatatcttccaattggttctgcgcatcgagggcactctttaaagtcaccgcatcgattccttcaccccgttcgtttaattcaaccatcgtctcgaagatcaaacggtgggctttacgataaaaatcgtcggcagtaacgtattccattgcttcaacgagcgcattgccactaataaagacggcccctaaaacggcctgttccgcctcattattctgcggcggtacttgttcaattagttcattattcaccatttttactcctttggttaatcgacttcaattactcactagtttactcaaaataccagtgactggcaacagtcaccgattggtcagcaataaaaaaagccgtgatagtggtgctaatcacggtcttttcaatcattcattttattattcggttacgatatgcacacgaatcgtagctgttacatcagggtgaatccgtacatcaacattccggtaacccaacgctttgattggttctggtaaatcaattttccgtttatcaacattgatctgatattgttgagccaatgcttgggcaatttgcttgcttggaattgaaccaaataagcggctgtcttcgcccgctttagatttgatttcaacgattgttttatcgtcttcaattttggcttttaaaacctttgcttccgctaattcagcagctgcatttttagcttcagcatgttgttggccttttaaagcactgatagcagctgatgttgcgggttttgctttcccatttttaattaaaaagttttgtgcgtaaccatctggcacatctttcacttggccttttttacctttaccgcgtacatcttctaagaaaataactttcattgttctgaccaccttatctaattaatcgtttgttgcttccttgtccgtttccggatcaaatagctctgccaaaaccgttaataacttcgccttggcttcggaaacagtcgtatctgccatctgcgttgccgcattggaaagatgaccaccgccacctaatttctccataatcacttgcacattcacatcacctagactccgcgctgaaatggcaatcatgccatctgggcgtttcacaatgacaaacgaggcttcaatgtctgacaatgacagcaaggtatccgctgcttgtgctgcgatgaccggatcgtaggtacggttgtcctcacccatacataatgccatatttggctcaaccatttcaatggtttcaattaaatgattcttttgaatataattatcgacattttcttttaacaagtgttgaaccatcgaagcatcagccccaactgaacgtaaataactagctgcgtcaaacgttcgcgtcccagttcgcattgaaaatgactgcgtatcaaccgtaatcccagccaacatcgttgtggcttcgaacttgttaatattagcgacattttgtggttgatactcaaacatttccgtcactaactcacacgttgaagaggcgtagggctcgatataaaccaacattgggttttctgggaactcttccccacgacgatggtgatcgatgacaatcgtccgctgagcaagcttctcgtacaacttaggcgccattgttatggatggtttagaatgatcgaccatcactaataaactattggccgttgctttttcgagcgcttcttcaggcgacaacacttccactgcaatttcagggtaggctttaacttcctctaaaagacgttgaatatctgtatgaatattgttttggtcaacgaccacgtagcacttcttaccgttcatctcggcaatccggcgaatcccaaatgaggcgcccaatgcatccatatctggccgaatatggcccataacaaagacttcgtcaacttgtttgaagatttcttgtaaggcttgtgaaatcatccgtgcacgaacccgcgtccgtttttccatcggattagtcttaccaccataaaaacgtgcttgtccttcactcgctttgacaacgacttggtcaccaccacgaccgagggcaagatccaaattgctctgtgaagttgttgctagaacggctaaatcggattccccataagcaaacccaacactcaacgttagtgggaagttttgtttggatgtttcttctcgaatttcatctaaaatcttaaacttctcttgttcagcggcgtgtaatgatttggcgtacgccaaaacaaagaaatgatcatcatcaactcgcttcaagaacatctgaaactgattcgcccagcgtgataactcgttggtgacatagttattcagattagaaacagattgatcatccattgtctgagtgatttcatcataattatctaagaacacttgcccgatggctacttgctcatcttcataacgatcttcaatggccgcatagcgtgtaatatcgagaagataaaccaccccaatgctttcttggataatgatttggaattgattatcgccccaacgaacaatttttgtttcattagcatcttcattttgtgcgactaattctgccaactctggatcgacagacttaatctttttgcctaaaacttctttattaccgaaatattgctgtaaataaggattcgtccattgaatctcacctgattcgttgtacaataaaatcccaattggcatcttaattaaagcctcttgctcgccgcgcttaatgcggtacgacaagtccgagacatacttggctgtattctcagtgaccgtttcgatcgcgtatagcacagtaatgaccgtcccgattagcagcacgaataaaattagagcaattagccaatctaacatcgcagcaaataccaaactaaccgctgtaaggcccaacaaaatcagggcaacggtccgcaggcgagtatcatctaaaaactgtggtaattttaattgtttaaacttatttttcatgtaaactccttaattctagatcccattctgattcttgttcatctatcattgagtctatgtggttctttactaaaacttaaaaaatgctacttttattttagcacaattgccctacaattaccgctttgaacccgtaatttaatcccatgttcccctattaaagcgcacaaaaaaagacctgctaaacagtgtttagcaggtcttttggttgactgattagtcttctgtaacgaatggtaataagcccataatccgtgcgcgtttgattgcaattgtcaaacgacgttggtttttagcacttgtaccagatacccgacgaggtaaaatcttaccgcgttctgagataaaacgtttcaataaatcagtgtctttgtagtcgatatattcgatgtggttagcagcgatgaaatcaaccttacgacgacgacggttgccgcctcttctttgttgagccattgaaagttcctccttccaaaacagtttattttagaaaggtaaatcatcatctgaaatatcaattgcttgaccattatttgcaaatggatcggcttgagtgttatttgcagctgatggattacccgattgttgagggctggtaaatccagattgttggctaccattgctttgattgttgttaaagttttggcttgcgccatccccttgccgttgctccgttgttgtccgtgattctaacaatgagaagttatcaacgaccacttcggttacgtatacacgttgaccttgttggttttcataatttctcgtttgtagacggccatcaactccgactagtgagcctttcttagtgaaattagcgaaattttccgctgatttacgccagatgacacagttgataaagtctgcttcacgatcaccattggcattcgtgaattgacggttcactgcgattgagaaagtcccaacagcagcaccactagaagtgtaacgtaagtcaacatcgcgtgttagccgaccaacgagtacaactcgattaatcattctgtcagctcccctctattcaataattacaattcaaaattagtcttcgcgtttaacgatcatatggcgtaatactgagccatcaatcttagctagacgatcaaattcgtttaaagcttcatcattatcagctaaaacatttacgatatggtaaatgccttcgtgttgattgttgatttcataagctaaacgacgttttgaccagtcttttgaatcaatcacttcagcgccgttgtcttttaagatgccgtcgtaacggttgacaagagctgttttactttcttcatcaagtgttgttgagatgatgtaagtaacttcatattttgattgagccatgactgttcacctccttatggactttaggttcttacctgtgtaagaacaaggagtaactgactaataaaaattagcctcacgatttagaccctgtgtctaaatcacagatactcacaagataaaattctatcataacggccgttaaaatacaatctaaaataaaaattgttgctgctaacacgcttggtaacagttgttacaagtgtatttacgcagaaacgatttttatttttttaatttaattaattttctgaatcttgatcatctgatgccgattgatcggcttcagcccgcgcgagtaattcatcgacttgtgctaagccagtatcagtagtgtcatcagttggtgctattggtgccgtcgttgcttctggtgtttcaggttcatctggttcagcttcgactttcgccattgttgcgaccttcgcttcgtcatccacccggattaaacgcacaccaagtgtggcccggccagtttgtgaaacgttagcgaccttgaaacgaatcaagacgccagtatcagtgattaagagaatatcctcttctccagtgacggcagcaatcccagctaatgggccgttcttttcagtgatgttggcagtcttaatccctttaccaccacgacccttgattgggtaatctgcaaccggtgtccgtttgccgtaccctttttcagagataacaaggatttcttgacccggaatcagtaagtcagagccaaccacatagtcgccttcacgtaaccgaatcccacgcacaccagcagcggttctccccatcgaacggacagctgtctcactaaatgacacagcataaccattataggtcccgataaagatattttgttgcccatcagtcatcaagacgttacttaattcatcctcttcccgcaaggtcaatgctttcaacccattgctacggatattggcgaattcagaaacggatgtccgtttgaccgtccctaagcgggtaataaagaagagtgattgttcgtcttgcacttctttaccaacattaaccacggtctgaacgcgttcatcagaattaatgcctaataagttaatgattggaattcccttagcagtccgcccatattctggaatttcataccctttggcacggtaaactttcccagtattggtgaagaataagagcacttcatgagtcgaagtcgaaagcaagtgttcgatgaagtcgtcatcatggacgcccatcccttgaatcccacgaccaccacgattttgaactttgaattcgctggctggtaatcgtttaatgtagccgttatgcgttaatgcaatcacaacgtcttcttcttcgattaagtcttcgtcttcaagactaagcacttcacccaccaataattctgtccggcgtttgtccccgaatttactttggagttcaagcaattcatcgtagataatcttcttaatgcgttctggtttggctaaaatatctttcaaatcagcaattaaagtcatcaaattattgtattcattttcgactttatcacgttccaaaccggttaatcgaactaaacgcatatccaagatggcttgcgcttgtttatccgataaatcataacgatccatcaacaagaccttagcggcatcacctgtattcgaaccacgaatgatctgaataatcgcatcgatatggtctaaagcaatgcgtaacccagctaaaatgtgcgcccgcgcttcggccttcttcaaatcaaattcagtccgccgacgaatgacttcttcttgatgcactaagtagtgttccaagattgatttcaaactcaagactttaggggcaccattcacgatggccaccatattaaatgagaatgaggtttgtaatggtgtcaatttgtacaggttattcaagacaactgaagcactcatatcccgacgcacatcgattacgatgcgcatcccatcacgatcagattcatcgtttaaatcggtaatcccttcaagccgtttgtcacgggctaattcagcaatccgttcgaccaacttggccttattaaccatgtatggaatttcagtgacaataatccgttctttgccgttcttttggacctcaacgtccactttagcgcgaagggtgattgtccctttaccagattcatacgcatggcgaataccagatttacccatcactaacccaccagttggaaagtcagggccaggtaaggcatccatcaaatcagcggttgtcgcatctggattatccatcaagatgtgtaatgcgctaatcacttcggctaaattatgcggtggaatattggttgtcatcccaacggcaatcccagtcgccccgttgacgagtaggttcgggaaacgggctggtaaaacagcgggttcgcgttctgactcatcataattcggtacataatcaattgtattcttattgatatcacgtaacatttcgacagccatcttgctcatccgagcttcggtgtaccgcattgcggcagcaccatcaccatcgacagagccgaaattcccatgaccatccactaacatgtaacgataactaaaatcttgtgccatccgcaccattgcttcataaatcgctgaatcaccatgtggatggtacttccccataacatccccaacaattctggcagatttcttgtaaggcttttcgggagtgacccctaattcattcattccgtataaaattcggcgttgaacaggttttaacccatcacgaacgtctggtaaggcacgcgcaacaatgacactcattgcatattccaggaatgatttacgcattgtcttagataaattgacgttttcaatccgaccgtcttggccaatttcgtttgccattaatctataaacccctctcagtcagtctttcaatgtgtccgtttaagcggcgaacacgctatgcatcgatgctctttggatccatgtaaacggcattttcttcaatgaaaatccgacgaggttcaacccgatcgcccattaacatttcaaaaatttgatccgcttcttcggcatcttcaacgttaacccgcaacatgcgccggttttcaggatccatggttgtttcccataattggctagcatccatttcccctaaccctttgtaacgttgtacttcaggtttaggacttggttggagcgtccctaacacttcttgtaattcttcatcagaatcaatatagcgcatcatcttcccttgtttaacacggtacaaaggtggttgtgcgatatacacgtaacccgcttcgacgattggtcgcatgtaacggtagaacaacgttaaaagcaacgtccgaatatgcgcaccatcgacatcggcatcggtcatgatgatcaacttatgataacgggctttagccacatcgaattcttggccaaaaccagtgcccattgctgtaaataaggtccggatttcatcattcgccaaaattttttccatgctagctttttcaacattcaggattttcccccgaattggcaagatggcttgcgttaaacgtgaacggcctgattttgctgaacccccagcggaatccccttcgacgatgaataattctgaaatagcaggatctttactactattatcggccaacttacctggcaagtttgagatttcaagaccgttcttcttccgtgtcacttcacgagcgcgtttagcagctaaccgggctttggcagccaatgagcctttgtcgacaatttggcgggcaatcgatgggttttccatcaagaacttcgtgaaatgatcagagaacatccgatcagtcaccgtccgtgcgtcggcattgcctaatttcgtcttcgtttgaccttcaaattgaggatccggatgtttaaccgagacaaccgctgttaagccttcacgcacatcttccccagaaaggttcgtgtcgttggcttttaagatgttttgcttggttgcgtagtcattaataacccgcgtgagcgccgtcttaaagccagattcatgagtcccaccttcgtaggtatgaatgttattggcaaaggtcatcaagttcgtccgataatcattcgtatattgcaaagcaacttccacggtaatcccgttttgttcaccttcaacatagattggttcgtctaaaagggtctcttttttgtcgtctaaatattcaacgtaactcttaatcccaccttcatagtggaattcaagtttttcatgtgtttcagcccgtttgtcggtgaacgttaacttcaagcctttgtttaagaaggccaattcccgaatccgcgttgttaaaattttatcatcatacaccgttgtttcagtaaagatatcagcatcagggacaaaatgaactttcgtaccatgttcatgggctggtgcgtcaccaatcatcttcattggcgtttgcactttcccccgcttgaaatcgatgtagtagcgtttaccgccttgagtaacaaccgcatctaattccgttgacaaggcattaacgaccgaagccccaacaccatgcaacccaccagatactttgtatccgccgccgccgaattttccaccggcatgcaagattgtaaagacggtttcgagcgcagacttaccagtcttagcttgaatcccaactggaatcccacgcccatcatctgtaactgtaatactattatcgggttcaacaaccacgttgatttctgttgcaaaaccagcgagtgcttcatcaatcccattatcaataatttcccaaaccaaatgatgcaacccttgggaactcgttgtcccaatgtacatccctggtcgtttacgaacggcttctaggccttctaacacctgaatttgactggcatcataagatttagcgcgttcttcttttgcttccatttgtgcttctgtctcttgattcatttgatcatctgccaagaaaaaaacctccgtttgatcgttttttgactaatttgctgctgcatcggccactgtcacggtgccgtttgtcacggtaaacacccgtggcgcactaataatttcttttttgacattttcaagactagttgtcgttaagaacgtctgcaccttattctggaacgttttcaataagtgtgtttggcgtaaatcgtcaagctcggacaacacatcgtccagtaataggacgggatattcaccggtttgttccttcattaggtcaatttccgccaatttaacacttaacgcggttgtgcgctgttggccttgagagccaaacgattgcacgtccttaccgttaaccaaaaataacacgtcgtcgcggtgcgggccaaccaatgtcgtgccctgttcgacttcccgtgtttggtgcgactcgtatagggtttgaaactgttggtataaaccttcggcatcaagtaccaactgctcatctggaatctgactttggtatttaaacgtcaaaacttcccgctctttggtaatctcttgatgcaacttctgcgcccacttctccatctgttgcagaaattcacggcgagcaaccgtgacttccgcgccataagcggctaactggtcggacaatacgcctaaatacactaaatctttagcttgacgtcgttgtagttgcttcaaatactgattccgctgtttcaaaatcgacttgtattgcgaaatgttatacaggtacttcgcactcatttgaccgaattccatatcgataaagcgtcgtcggacagctggcgagcctttcacgatattcaaatcctccggtgcaaacaagacgacattcaattgaccgatatattgggataacttagcctgttctaaatgattgaccttcgcttttttacctttttgactgaccaccaattctaatggtgtgtggccagtttgccgttgtaccaagccggtaatctttgcgaattcgccatcccattgtatcagttcacgatcattattcgtccgatgcgaacgagccaaagccaacacatagatggcttctagcaagttcgttttgccctgcgcattttcaccaatcaagacattgatatctggcgagaaatggacgtccacttgctcgtaattccgataatgatcaagttggagttcacttaaatacatagtcgcctacaatctttcttgttgtttaatgacaaactggccgttatcgggcacctcaacgacgtcttccagatataacttccggccgcgacgatcatcaggttctccgttcactaaaaccgttgtttcttttaaaaaccattttgcttgcccacctgtttcaatcacaccggcctctttaaggagttgcccgagtgtcacaaactcagcttcaagtttaatttcttgtgccatactcaacccaccattcttaacgatattaattactacgctaataccgatctgttataccttacaattatagactttttttgccttaaaaacaaataaacacagctaaaatgctttctgagcgtttttaagtgctttaaccttatcctacttgttttatccgaaatcgctgtaaacgaatttattttaattttagcgcaaaaaaaaacgccccatttttaaatgcggcgttttttgattattaaaatgtccgaactggtgtgattaattgaatgtagtgttcttgatcttcacttgggaccaatgtaaatggccgtaaagctgccgtaaagttaatcacgatggttgtttgaccaaatgaacgtaaagcatccttcatataatctgggttaaatgaaatttcgagatcttcgcccgttaggttttcaaattgaagggcttcttcaacattcccaacgtccggtgagttcccgtagatgattgccgtgttgtccgttgtattcaatgtcaaccggacaacattgttccgactttcatgagacaacaatgatgcccgttcaatcgcagctaataagaccggtgcattgaattcgatttgtgtacttgaagaagttggaattaaacgtgctgtgtcagggtaatttccttctaacaaccgagaataaaaggctaagttaccggctttaaagagcacttggttttcagcaatccgaatttcaacggtttcaacttcgtctgctaacgttcttgaaagttcaattaaactcttcccaggaataatgacatcgtagttcccatcacttggtactgaaacggttaattttcgttgtgcaagtcgatgactgtccgttgcgacggctaacatttcgccatcttttaaaaccaaatgaacccccgttaagattgggcgactttcttggttagaaacagcgatgacggtttgatgaattaattgtttaagcacatcagtactgatactgaacggattttgtcccgcaatttcaggtagatgtggataactattagcatctaagccattaattgtaaattctgatttacctgaacgaatggttgtttggaagttgtcaccaacagcaatcgtcatttgatcttcaggtaattttttaacgatttcactaaagaagcgggctggtaaaacaatggcacctgcttcttcaacgactaattgattcttttcatcattactagcaagggttgcttcaattgaaatatcagcatcactaccggttaaggttaagccttcttgcgaaagcactaatttaagccccgtcaaaataggaatcgttgttttagctgaaatggcacgttgaacatcattaagggttttgatgaacacgttgcggttaattgagaatttcatggatgttaaacctccgaaggaaaatagatatatatattataaaagaattttaagtaatagtagtagggcctgtggaacctgtggataacatagaaaagcaaaagagtgtctagttttccacttgtggataagttgagaacaactcttaggataactttagcgtttatccacagcctatatttagccttttaaggtattcttcaaatctaagatggcatcttttagattttgatcactcgttaaagcttggctaattcgttcatgagcgtgcataactgttgtatgatctttaccgccaaattcttgtccaattttgggaagagaactgtcggtcatttcgcgggccaagtacatagcgatttgccgtgggagcacaatttctttaacgcgcttgcgcccttttaaatcagtgattgaaaggctgtagtacttagcgactacggattgaatcttagcaattgaaagttgactcgacttcccattgagtttcaagcctttaagggcatcggcggcaagactagttgtaatttcagcattttgcatggttgcataagcttgaacccgaaccagtgaaccttcaagttcacggacgttggaatcaatttgaccagcgatgtagctcaaagtatcttctgggatttcgaggcgttctgtgtcggctttgttccgtaaaatagcaattcgagtttccagatcaggcggcgtaatgtcgacggacaagccccatttaaaccgtgaaactaagcgttcttggagcttaggaatttcattaggtaaacgatcagatgttaagacaatttgctttttatcattgtagagatcattgaaggtatggaaaaactcttcctgagtcccttctttatccgcaaaaaattgaatatcatcgaccaataataaatcaacgtttcggtattcttggcggaatttttcttgattcttcgtttgaatcgaattgatgaagtcgttggcaaaagcttcactcgtcacatacttgacgttcgtgtcaggtttagagagtaacagctggtgaccgatagcttgcatcaaatgggttttacctaaaccaactccaccgtataaaaaaagtggattatataaaacaccgggttcttctgaaacaacgagtgctgcagcgtgggccatctgattgcctttcccagtcacaaacgtgtcgaacgtgtatttactatttaaatgcgtttcacgtaaaaaggttggggtttcagctttggtgaggctgcgttcttcagctggtttttcagcttgaagctgctcggcttcggtaggtaacagaaaaataggggtcaattcaatctctgcgaattcgtaggccccttcaacgaccttagtggccaagttactttcccaatactctttgtgtaaaggagaaggcacttcgatcagtatttcattggctctaaaagcaagcggtttggcggttttaatccaagcattaaaaccgacgggtgttaaatcattttggaattcttcccgcaaatagttccaaagttcctgaagatcaggcatgtagcgtgtcctcctcacgtaaaataaccactttattgaaaaaaagttcaataaagaaagactatctacattctagcattctaaaaaaaagttttccacaacaagaacaaaatccacaggaatgaattaaaaagttatccacttgaacacacgaccggggataacttttagtggggactgtggaaaacagaaaacaacaaacgattatcgcacttatccacaaaaaagtgtgtgtatctgatgcttgctattaaaaggttttatcaatttgtgcacagcttgaaaatagcttgtggataacatagtaacaccctgtgattttctggataaatcagcaagtaatctgtgcgtgacaaaaatcggacgattcggtataatcagttatccacaagaaagccaatgaattattttttgtggataagaatatttattctgtttttttatggaaagtgttttaacttctatagaaatatgctattatattttagtgaatgtcgtaggtggtatttatcacccgttgtttctcagatatgaaaacaatagacacagtcaattaggaggtgccagtataatgactacaaagagaactttccaaccaaagaaacgccataaagaacgtgttcatggtttcatgaaacgtatgaatactaagaacggtcgcaaggtacttgcaagacgccgtgctaaaggcagaaaagtattatctgcataggccactgatgcttcagtggtttttttattatcctcaattaattaaatgaaatgccggagtgaattatgagaaagtcgtaccgcgtcaaaaaagaacaggatttccaaacggtttttgaagcaggtcattcagttgccaaccgcaattttgtggtttatcaattagaaaaacctggtcaaaagcattttcgggtgggcctgtccgtaggtaaaaaagtgggtaacgcagtgatgcgtaatcaggttaaacgttacattcgccagagcttgttggagttgaagccagagttaccacagactgtcgactttttagtgatcgcaagacgtggcgctaaccaactaacaatggcggaaaccaaacagaatttaatgcacgtcttaaaactagcaaagctattaaaggaagaagcagattctgcttctgaataagtgagggattacagtgagttcaaaaaatcgcaagcggctattattagtggccagtctattcttgttcatgctaatcgcagcggggtgtagtacatcaccagttgatagtagcagtactggcttctgggatcattatgttatttataacttttcccgctttattttatggttagcagacatctttggtggcagttatggttgggcaattgtggccttcaccatcatcattcgggtgattatcttgccattaacttggtggcaaagtaagagcatgctcaaacaacaagaagttgcaccagaaattcaagcacttcaaaagaaatatgcttctaaagatgctgagacacaacagaagttacgcgaagaaacgcaaaagctatatgctgaagcgggcgtcaatccagttgtgggctgtttaccactagtggttcaaatgccagtgttgattgccttgtaccaagcaatctatcgaacagctgctttaaagagtgggacgttcttatggatgcaacttgggaaagctgatccttactttattatggctatcttggctgcgatctttacatttgcaacatcgtatctaacaatgatgtcgcaacccacgaagaatgctgcgtcatccgcaatgttgtgggtgatgccaatcatgatttttgtgatggccatgaacatcgcgtctgctgtttcaatttactgggtggtaacgaacgccttttcagtgggtcaaacaatggtgattcaaaatccatttaagattcgccgcgaacgcgaagccaaggaaaaagaaaagcgtgatcgtgaaaaagcacttgctaaagcacgtaagaaagcaactaagaaacgttaatttccaaaattaaaagaccaatcataatgaattttcattatgattggtcttttttagaataggtaataggcagcaagtacaagaggaattgcgatagcgcagacgacacaaacggcaccaataagtaacccgcttttatggcggttaatcgttgtttttctcagcaagaatcgggatccaaaaaataacagaatggtaaaaggatgaggggaacattctgagccaccccttcgacaggtggaaaggttagcattaaataatctaatagcaaataaaggagtgttgttaatataaaaagaaatagtttcaatggctaatcctccatagcgctagattaaaaaatagaaattcagatagataaattgttaaaattggttttaaaccgttttcttaattttatagtagcatcatgattggtaataatcgataactaatttcaagactaataatcattcaaaaatctttaagaataaaaaaatcgtaaccgatttggttacgattttttgctgtttaatagtctaattgtttcaaatgaaggaggaagtgctgatcatcaatcggttttagatgataaagcactagaattttacgcgttaactttggttcaatcggtgcagcatcgtcaaacatatggaagtgatcgaaaaaggctgtattgacttgctcgattaacgttaaaatgccggcactccctaaatcgaacccaagatggtcggtgtctgataattgactcgccttaatatgggttaagtattggatcagttcgggtcccattgccataattttatcgggcacttgggtcgtttttaacagtgtttttaaatctgcgattgtattagcgggtacttgttcaatcgtcatcataaacatcgcctttctagcagctatgtatctgcttacattcctaatttaacagatattatcaaaatgtctagtggatctggttgaattaatcgcgctttgcgcgaaatttcgctataataagtgcaatcgtttaaaagtggaggataaagagatgacctattcagaacaatgggatttagaaccgatttttgccggggggattgattcaccagcgttgacgcaacgattggcggatttgactgcacaaatgacgcccttattagaagcggtccagaactggacgtttgcgacagatcagccaacatttgcaacgctaacgcaaatcactgaacagttacaagcgattgaagcgggtctcaagcaaacggggagtttcgtgaatatgattcaatcaacggatgaacgcaatccgcaagttgcaccgatgatggggcggattaatgcgcttgaaaatgatgcgaatcagattgatgtcgcactcacaaaaaaattggtcgcaatgtcagacgcagattttaaaaccgttgtatcgacacctgccttacaagcgattcagtttaatctaaccgaaaaacggacgaatggtgctgaacttttggatgaagcgacggaaaaactaattaaccagttcgcgttagatggtttaactggatggagtgatcattacgactcattggttgctgaaattcaagtccccgatggtgagacgactttatcggcgggacaagcgcagaataaatttgaatctgatccagatcccaaggtacgccaacgcgtctttcaaaattggtaccagacttgggatcggtattcaccattattaacggatacgttaaatcatttggctggcttccgcctaacggattatcaagcacatggcacaacggactttttgaaaaagccattggcaacgagtcgcatgcaacccgcaacgttagaagcgatgtggtcgatcgttagtcaaaataaagcgccgcttgtcgattttctaaatcggaaggcagcgttaatgggcaaagaacagcttgcttggtatgatacctgggcaccagtggttgtaggtgattttcaaccgcagcgttattcttatgatgaagcagcggattttatcatgcagaactttaaagcgttcagtcccaagatggcttcggtggcacaaaccgcgtttgaaaagcgttggattgaagctgaagatcggccaggcaaacaaccaggtggttatatgactgatttacctgaaacggatgattttcggatttttatgacatttgatggcacccccaatggtgttgcaactttggcacatgaattagggcatgggttccatacaatgatgattaatgatttaccaagttggcgacaagactatgcgatgaacgtcgcggaaacagcttccacttttgctgaactaatcgtcagtgatgcgactgttaaagcagcgcaaagcccagcagcgaagattaatttattggatcagaaaattactaacgcaattgatatgtttatgaatattcacgcacggtttttattcgagcgacatttttatacagcgcgccaaaatggcctgcaaacaacagctgatttaaaagcactcatgctagccgctcaaaaagaagcctatgcggatgcgttgactgattatgatccgctattctgggcggacaaacagcatttcttcttcgatgacgtgccgttttataacttcccttatacgtttggctatcttttttcgatggggatttatgccaaggcacagacaatgcctgattttgaagcggactatatcgcactattacgtgatacggccaatatgtcgactgaagcattagcgcaaaaacatcttggggttgatttaacccaaccggatttctggcaagctgccgcggatagcatcgctaaagatgtacaacaattcctagctttgacggcggactatctcagataatgacatgctatttttaaattggtatatcatggtataataaacgagaatcgggcgctcacactagttggagtgaccaaattgatcggaggttttgaaatgccaacatatgaaggtagcgatattcaagcagcggtaaatgaagggttgcaagccatgcatctaacgcgtgaggaagtgtccgttgatgtattggaagccggcaaaaaagggtttctcggttttggtcgccgcttagcagttgtccggctaacgccaaatgaacaaccaagccaagttaaacaaagcgccccagccccagttcaagagctagttgaaccaatgccaacaaataatttaactagtacgccgcaaaagcggaaaagtggtgcggaaacggaagctgagttaagcgcctatttggaagccatcacggctcaaattggcacaccggtcagcattcatgtaactcacgaccatcggagtacgacttatcatttgaagaccgataaagaaggcttgttgattggtaagcatggtaagacaattaatgcgctccaatatttagcgcagacttactttgatcatcatatgaagggcaagcaaaccattatcctagaagttggtgattatcggcagcgaagagcagcgattgtcagccaccttgccgataaagcagcccgtgaagtcgttgcgaccggcaaaccagtctttttagaaccaatgccggcttttgaacgcaaaattgtgcatgggcatttagcaactaatcaccatgttcaaactcattcagaaggccaaggcgatcgccggtcaattgtggtggaattagcgcgcacattttaggtgttgtgaattgacgctctaaaaaaatcgtgtataatgaaactaattaaatatcgataaagtagtgaaagtgctttgtccaccccttacgcaatgacgggaggggtggacgctaagcgctttttttatgcagctatttcggaaaggaagcatttaaaatgccaacgacagtcacagaatttgatacgattacggcgatttcaacaccacctggtgagggggcaatttcaattgtgcgtctttcaggggatgagagtttagccattattaaacgcgtttatcgcggcaaagatcttgatcaagtggcgagccataccattaattatgggcacattatcgatcctaaaaccgacgcagtagtcgatgaagtcatggtgtctgtcatgcgcgcacccaaaacgtttacccgcgaagatgtgattgagattaattgtcatggcggaattgtcgcaacgaaccgcatcttacaattattaatgagctatggtgcacgaatggccgaaccgggtgaattcacgaaacgagcctttttaaatgggcggattgatttaacccaagctgaatctgtgatggatctgattcgggctaagactgatcgggcgatgcaagttgctgttgatcaattagatgggagtttaacgcacctgattaagaatttacgccaagaaatcttagaagtattggcgcaagttgaagtcaacattgactatcccgaatatgataccgatgaaatgacgacgcggattctacttgaaaaagccgaacttgtgaaagcgcggattggtgaactacttcaaacggcacaacaaggaaaagtcttacgtgaaggcctagcaacggccattgtcggacggcccaatgttggtaaatcaagtttgttgaatcacctattacatgaagataaggcgattgtgacggatgttgccgggacgacgcgtgatgttttggaagaatatgtcaacgtccgtggggtaccgctgaagcttgttgatacggcaggaattcatgataccgaagataaggtagaaaagattggggtcgaaagaagtcgcgcagcaattaccaaggctgacctgattttattagttttaaatcaaagtgaaccactaacggttgaagatcgcgagttaatcacggccaccactgataagaaacggatcattattttaaataaaaccgatttaccgaacttgttagacttaaatgaactccaaacattggtgaatgcggatgaagtaattcaaacttcaattttaacaagcgaaggggtgaccgatttggaagcccaaatcgccaaactcttcttcggtgggattgaaaatagtcaaagtacggtcatgattactaatgcccgccaaattggtctattaaaccaagcacaacaatcattagatgaagtcatcagtggaattgcagctgggatgccagttgaccttgtgcaaattgatatgaccaactgttgggataagctcggtgagattaccggggattcagcaccagatgaattgattacggaactctttagccaattctgtttaggtaaataggtcttgaaccatattaaaggagaacaaaatatgcgagaatatgacgcagcgcactacgacgtgattgttgttggtgccggccatgcaggttctgaagcggctttagctgctgcacgaatgggccgcgaaacattactattaacgattaacttagacatggtggcttttatgccatgtaacccatcattgggtggtcctgctaaagggattgtcgtccgtgaaattgacgccttgggtggtcaaatgggccgcaatattgataaaacatacattcaaatgcggatgttgaatacaggtaaagggccagctgtccgcgcgttacgcgcccaagctgacaagcacgcttatcaccggacaatgaaacggactatcgaaacgacggagcacttaacacttcgtcaagggattgctgaatcattgattgttgaagacggtgtctgcaaagggattgtcactaacactggtgcccgttacagcgctgatagtgtgatcttaacggctgggacagcttctcggggtaagattattatcggcgaattaacctattcatctggtccgaataattcaattccttctattaaactttctgaaagtttggaagacaacggatttgtcctcacgcgttttaaaacggggaccccaccacgcgtggacggcaccacgatcgacttttcaaagacggaagaacaaccaggggataaggaaccaaaccactttagtttcgaaacacctgatagtgcttatttgaaagaccaactttcttgttggatgacatacacgaatgatacgacgcatcaagtgattcgcgacaatctcgaccgcgccccaatgtttaccggcgtaattgaaggggtgggtccacgttattgcccttcaattgaagataaaatcgtccgcttcgcggataagcctcggcaccaaattttcttggagccagaaggccgcgaaacagaagaatattacgtcggtgatttctcaacctcaatgccagaagaaatccaacacaaaatgattcattcgattgaaggcttagaaaatgcccaaatgatgcgtcctggttatgcgattgaatatgatgtcgttgaaccatggcaactaaaaccaacccttgaaaccaaagtggttgaaaatctttatacagccggtcaaatgaacggcacttcaggatatgaagaagcggctggtcaaggcttgatggccggcatcaacgctgctctgaagcaaacgggccgcgacccattcatcttggaccgcagtgaagcttacatcggggtcttaatcgatgacttggtcacaaaggggacgaaggaaccttatcggctattaacctcacgtgcggaataccgtttgatgcttcgtcacgataatgcggatttacgcttaacagaaaagggtcatgcattaggcttaatcaatgatgatcgctttgacagctatgaagtgaaaaaagcagccgttgaagctgaattagcacgtttagcaaccattcgcttgaaaccaaccccagaaatccaagcctttttagcggctaagggtgaggcaccacttaaagatggtgttttagccagcgacttcttaaaacggccagaagtaaagtatgctgatttaatccaatttattccagcagtcgaaggcattgataaccgcgttgtggaacaagttgaaattcaaatcaaatacgcgggttacatcgataaggaaaaagctaaaattgcgaagttaaaacgaatggaagctaaaaagattccagccaatatcgattacgatgcaattgaaggccttgcaacagaaggtcgtcaaaaattacaaaaaattcaacccgaaacacttgcgcaagccagtcggattggtggggtcaacccagccgatatcgggattctaagtgtctatattcaacaaggtaagattgctaaggtcaaatagcctggttgataactagtcattagatatgttagagttaagcatatattgtcaatggtagaaagccagccgtttcacatgaaacggttggctttttagagtcatgaaagaaaagtgagggaatcaagtgataactgttagtgaaatgagcttaacgctttctgggcgtaagttatatgaagacgttaatttgaagtttacacctgggaattgttatggcgtgatcggtgccaatggtgcaggtaagtcaacttttctaaaattattagaaggtaaattacaaccatcatcaggccatatctcaatgggccctaatgaacggatgtcgagtttgaaccaagatcactacgcttttgaagaatttgaagtgttagagactgtgattcaaggtcataagaagttgtatgaagtgatgcaagctaaggatgccctatatgctaaagctgatttcactgaagaagatgggatgaaagctgctgatttagaagctgaattcgctgaaatgaatggttgggatgctgaatcagaagctgctcaattacttcaagccttagggattgatgaatctttacaccatgtgaagatgagtgaattgatggaagggcaaaagattaaggttttacttggtcaagcgctctttggcaaacctgatatcctattattagatgaaccaacgaatgggttggacagtgcctcagttgaatggttagaagatttcttagcagacttcccgaacatcgtgattgttgtttcccatgaccgttacttcttaaaccaagtctgtacaatgatgtgtgatgtggacttcggtcgcatcaagacattcgttgggaactatgacttctggttagaatcaagtaagttagccgctaagttacaatcaaacgttaacgctaaaaaagaagaacaaatcaaagaattacaagattttatcgcgcgttttagtgccaatgcttcaaaatcaaaacaagccacttctcgtaagaaacaattagaaaagattacattagaagatatccaaccctcttcacgtcaatacccattcattaagttcgatttcgaacgtgaattggggaatgatcttttacgggttgagaatgtttcaaaaacaatcgacggtgttaaagtgttagataacatcagcttttcagttaagccagacgaaaaagcagcaatcgtttcacgaaatgacgttgcgacagctgtcttaatgcaaatcttagcaggtgaagtgcagccagatactgggacagttacctggggtgtgacaagtcaacaatcatacttaccaagagatacgaactcagccttcaatgatgatcaactcatcatcttagactggttacgtcaatttgccgctaagggtgaagatgacaatactttcttacgtggtttcttaggcaagatgcttttctctggagatgaagtcacaaaagaaatcaatgtcctttctggtggcgaaaaagtgcgttgtattctatcgaagattatgttgcaaaaatcgaatactttactattagatgatccaaccaaccatttggacttggaatcaattacttcattgaatgatgctttgatcgatttcaagggtgctttagtctttacatcgcatgatcatcagtttattcaaacaattgcagatcatatcattgaagtatcagcgaacggtgttgtcgaacgtgctgaaacgaactatgatgagttcttagcacatccggaattacaaaaacaagttaaaaacctctacgcttaatagtagaaaaacgaaggcccctagtatagctaagggcctttttttattgttataagataattattatttatttacagaaaatccttgcatcacgggttgcaagttggtatactaataaagttgtcaaaagcgagctgattagtgataagcagtatcgtcaattaaataaaaagttttgaaaaacacttgttatttaattgaaaacatgataacatattatatgttgcttaaggagttataacttctaagtaataattaattaaaaatagttgttgacaggcgataagttgtgtgatataattaaaaagtcaaaaaaaacgacacccaccggctgagagttgccagatgggtgtcgtttttttatttgactgcctgtgttttaaaaacagcgatttgatttaaaagttcactaatgcgtattcgatcactcttttgttgttgacggctcgttgtgagtttctgatataagtttaactcatcaccctcgttgaaggcggtgaccatggcttcagcggacgagacgtaatcagtcattactaattgtaactgacggttaatttctcgtaattcttttggcggatttagtaatgtggcttgatcaataaattgtttaaaaacccgtaagttacgttgaaaatattcgtttaacgattccaaattttcgcccaccagacagcgccctttgatgatgttcttgctggtccgggtgtactcactaaatactgtttcaaacacgataaaccgttctaaaaattgattccaccgtacgatgtattcctgagtcgatagttgatccgctttgacactcatggtcgttccccctttaatataatatctaaatactcatcatgagtataaatatatactaagtatagataaaaggctaattattagcctttgttaccgataacgatttcaaattgcgtttcattttacaaataaaacatgacgtcctatagttaaggtaagccaaaaaaaggatctgattacttgtccaaccaacgttatctatctggaacagcactaaaactatttacattcaccctactaaccggcacgttcacaatgtctatcagccaatctgccctttcaactgcttatccaaccttaatggcctattttgatttatcagccacaactgttcaatggctgacaaccggttttatgctcgtaatgtgtgtcatgatgccgattagtccttggttattaaacaacatcccattcaaacgactctacatggggattttaagtttatttactattggaacgctattaattgtcttcgctaatcagttcggttgggtattgttcgggcgggcgttggaagccatcgcagtaggtgttttatttccatcgtttcaaactgtcttattaaccattactgctgaaaatcaacggggccaaattatgggcctggctggtttagtaatgggctctgcactagcttgtgggccgattatttcagggattattctcaactacttcagctggcgaggactattcatcgcctttattctgattatcttaaccgtgttagcaacagctaacttcactatttctgatgttatgccggctaagccctatcaccttgatggtctttccgttttatgtacaactggattaatcggtttattatatgtcatcagtagcgctaatcatcctactatcaacccaatcggactctggggtatcggattagtgagctgcctagcactgggttattttgtctaccggcaactcacccagacaacgccacttcttaatttacatattctcggttaccttaactacgatattgcggtcggattgactgctatttcctatatttcattgattgtcaccacagtcatctacccattatattttcaagctcaattgaagttgacgccgcttctttcaggattagcattggtccctgctgccgttgtgttaagccttttgaatccactcgcgggccggttagctgataaaattggctttaaaccgaccttactcgttggcctaaccatgattagcattggatggctagctttgattggcttctaccaatggctgtcattaccattgatgatcctgtgtgcctgtttcatcgaaggcggcaacgcatttgtcatgatgcctgctgttacacttggtgctaatagcctgccggatcaagtgctcgctgacggcactgccgtcacaaccacgattcgtcaaattgcgggcgcgctgggcgtcacccttgcaactctccttttaagtgtcgccggttaccaagtcgtatttattagtttgctcggcctgaccttaattggtctcggcttagccactcaactacaccccaaataagccacaataaaaagcagattagcgatgatgattgtcatcgttaacctgcttttttaataccggcgttgcttaattaagataagtccccatgtcattaaactaaatgttgaaatgatcgcgccgataattagtcccggcgcacgatagactaagcgaacttggttagtccctttctcaagtggcactgcaagcatattgcccatgactcgtcgtgtacgaactgtttgatgattgacttgcgcatgccaaccactgtcatatggcacacttagataaagtaattgatcagcggtcttagctggtactacaccagcaatccgaccattatctgccgacagttgttttaggtcgatctttaagcgttgttgtgccaactgatcaaaagcttgatcgaaatgagcctggtctaaactagccacctgaatcttacgaaaggctttaggttgccgactggtaattgtcagcgttagttgttgccctttttgatagcgacccaaaccaataatcgtggtcccattcaattcaatcggtactttatgtgttcggccattaattttcactttcagctttgataagttttgttgcggcaagtatagataagcatatccacttgtcttaacttgcgttgtaaacgtaatttgccgacgtttttgcgcttgtaaatctaattgattatattgataaaatggtgtcgtttgtcccgtcatcgcttgcataattcgatcttgattttcaaacggctcatgtgctttcaaagccacgtgtgctagctggtcattaaccgcaaaccctaagcctaacgttttatggggttgtgtcacaacctgtccttgcttagcaattaggtcatattgattggcaaatagtaggtcagtcagcacagtatgcccaatcccgttaatccgccgggcattcttactataaaaaccgagattaaccaacatcgtccgcatccgctcatcaagtgtcgaagaataattgtttaatgtatactgtccaaaggtcaacgcatcattgtacccataatacggttccttaaacgctttttttaagagaatcgcttggttattaacgcgatagaaatcaggtgtttgccgttcaagctgttcaaagagtgctgcttggcgttggtattgttgcgcataaacaacttgatcgcccatcggtaacttagtggtcgtcaagcggccattaatcaccagttcactaaacgtcaatacggctcccagaccaatcacccatggttgccaacgtgctcctttttgccacgctgcaaaaataacgctagccaaaaccattagtccgattaacaaccagagcgattgtttctgcacaccacgtacatgtggcccatagtagagcgccaactggccaatgctgagcaagccaccgactatcaaaataaccaggcgtttcgtttgacgtttaccgattggttcaatacttgcttcataggcaattttgatgagaacaaatgccatcaaataggtattccgatatggaaacccttctggttgctggaacatgtgccacatcgtattaaatgtcgttacccagaaacttaacgctaaactaacaattaaaaagccgttcgaccactttgcttgccgtcgaatggttggtagacagaaataatagaccgcaaataacagcgctaatgtactgataaataaagttggttcatgaattaagcgttgcgtataatggctgccgccgacttgaaattggctcaaaacttcccagccaaactgcggggttggataaaaactggttgcagcgattgtctttttcccagtcttcaacattccaagtaacgacggcaataatacaactgctgttgtgccccccgcaatcaatgacgcccaacaaaactgccagatagcctgccgccagtgaaccactagttgccaccaagactgttggggttgtttccatttgattaacaaactaattgcatacaaaacggcaaatagacatgacatataacccaagtaatagttggtaaagatagtggcaaccaacatccagatatataagccaggacgcccttttaaaaatagccgttctaatcctaagatgaccagtgggaggaaaatcagagcgtctaaccacattaggttataaaagttcattgccacaaagccacttaaactataagctgttgcaaaaattagcgcggaaaaatgatattcaggctgacgcgtctttagaaaatgggccatcgttaaacccattgccccaatcttcaaaataatgacatacccaaccaccactggcaactggctattcgaccaaaataggagcagtaaattaaaaggactgattaaataataagccgctagcggtaatatatcgccacccagtgaaagcgaaaatgaatacgtactgaaattcatctgggccatttgccgtttaaactctgccaaaaagggcatatattgggtaccgagatcactaatcaataaattatgccgtccaaatggcactatttggagcattgcatatagccccaccattaataacatgggaactagcacactcaataaatagtaactgacagctgttttatttgttctcttcatccgactcacttcttttgccttttctatagaataatacacactctaaacaaaataagccacccagacaatttgtctaggtgacttattagtaagttgcttacttcatcataccgagggtgaccccaccgacaatgactaataaacagccaagtgtgacgtaaaccatttcttttttcgttttttgttcacccaataggtaaatactaccgattgttgagatgataatgccacattgtgataatgaatagctaattgctagaccaatatcattcattgaaatcaacataaataagttcccaagaccccataataaaccagtactaatgttgagtgctgttttcttattgaagaccgctgtcccaatgccaacaccggcaaagattgcagcaccgacgaacattccaattgcttgtggtaaaacaattgatgttgcgccaatgtgtgaccagttaacgatgattgtgtaaccaccataaccgattgttgataagattaatgctctaaaaccacgtgcaaattgtgtatcttctttagcagcaacactgctcttcggatccttcattgaagttaacgtggcaccagcgattaagatcactaatgcagtaatcccgaagatgtaatcgtgcgttgccttccattcatggaataacaaagcacctgctaaagtgtttacaatcaattgcatcccggttgataatgggactgtcttagaaacacccatcgcttgcattgattggaactgttgtccttgaccaatgctccagaataaaccggaaatgataccgattaccataatccgtaagtttaaagcgggttgtaatactaaaaaggtaccgattccaaaaaccagcgcaccaattgtcattcctaaggtttgttgataggcattcccgccaagtttgccactcactaacccgatactaccccatgcaagtgcagggattaatgcaattaaaatagccatttataaattcctcttcttctctaaagtacaagaatccattatacatagttttatatccgctggctagtaggaaaacggcaccattcaatcgttatcagccttcactaccgtcatgtaagcaactgtcccagtcatgattgcgcttacgtaaattttacgtaaaaaagcgttttttttagtaaaaaaatcaacgataagcgttttcttaccgttgataaccttaatgttttcgctttgcatgttgtaggacttgatataacaggacgccaatcatcacccctaatgtattaaacatgagatcatcaatatctgccatgccagtccctaaaacaaactgggcggattcaatacacagggataacagagccccttcaataatcgtaatcaaccaatcccctttgcgctgtgtcaatgaccgtcgcaataaaccaaacgggataaaccacgcaatgttcccgtagaagttataccaataatcaatctgggcgggcgcttgccgtaacttgaaagtctcaacaaacggtgtcaaattaatttggctaagtggtcgttgcaaatggagctgcatttgccacggataataaatatgccgtaaaaccgttaatgagaccaataaggcaatataaaacacaaataacaatagtttcagttctgggagaagctgtattttgcgtcgtttcattaataagtaccccaaccggcacacaataaaaaccaaacaatacaaaatcgtcttatctaaactctccaccgtcaatttgatgagtggtaaatgattatactgttccccccaagggaggatccattgttcataaatacgcccaagaaataccaaaaaaccaacctcacttattccactaatttaacctatctgttcattattcaatgagtaattaagtccattatagctgtttttttcaataaataacgcttaattactcgactaaagtgaatcttaaactattaggtatcgactgcccaactttagcccgatgtgtgcctactgtgctatgctataatagaagttactataaattgaaacaggagccttttatgaaagttctattatattttgaaagtgaaaaactactcgctaaatctggaattgggcgggcgttggatcatcaaaaacgcgcgttaaccaaaatggggattgactatacgcttgatccgaatgatcaagattacgatatcttacatatcaatacatacggactcaaaagccgcagtgtcatcaaaaaggcgcgtaaaatggggaaacccgtcatttatcatgcacattcgaccgaagaagattttcgcaactcctttgttggttccaatcaactcgctccatttgttaaacggtacctcgttagcctctatcaacaagccgaccacttaattacccccaccccttattcaaaatcattattggaaagctatggtctaaccaaccctatcgctcccatttcaaacggcattgatttagctaagtatcaagccacaccagctaaagaagctgcttttcggaatttcttccatttaaagcctgatcaaaaagtgattatctgcgtcggcctcttctttaaacgcaaagggcttctcgattttgtcgaaatcgccaaaggtctacccgaatacacctttatctggtttggagatgtacccatgtacagtattccagcaaatattcgccggattgtcaaacaggatcatcccgacaacgtcatcttccctggttatatcaaaggcgatattatcgaaggcgcgtatgccaatgctgacttatttttcttcccttcttatgaagagactgaagggattgtcgtcttagaagcccttgcaagtcatcaaaaagtattggtgcgcgatattccggtttaccatggctggcttgccgatcaacaaaactgctacatgggtcacactaacgcagaattcagtcaactcatccaagcgatggtcactaatgccgttcccgatttaacagctcaaggctaccaaactgcgcagtctaagagtattacagaaatcggccatgaattacaagccgtttatcaacatgttttggcgccagatcaactgaatccaaagtacgatgccatcatgcggcccgcgaaacgttaagtttctgtttaaactttaaactgctatttgcgctaatgccgccctcgggttaaaataaggcattagcgctcttttagttctgttttttgaaaggatgtcacattatttgaaactcacaaaaattaaatcattcctatccacgagattaggcttcatgagtttgttagtctttttattttggctaaaaacgttattcgggtacttcaccgattttaacctcgcagctagtggcttcttacaaattgctattttaatctttaatccggtcgcgacgacgctccttttattcggcatcattctttatgttcgccagccgcatctcagttattggttgggcttgattatctatgccgccaacaccgctcttttatattttaatgtcatctattaccggcaattcaccgattacatgaccatcaacaccatcttagggtattcaaaagtttcggctgggctcagcaaaagttcactggccctcatgaactggcatgatgcgctgtattggattgatattattgtcttagccttgctgattttaaccaaggtcatcaagatcgacaaacacgcatttaatcggtggtgggccttcagtattacctcactggccgtcttattatttggcatcaaccttggcttaagtgaaatcagccgacctcaaattttatcacggacgtttgatcggaactacatcgttaagtacctcggcatcgacaccttcaccgtctacgatgctttcaagactactcagaataatcaagtgcgtgcccaagctgagagttacgacttagatccggtgctcgactttatgaaagagcattacgctgcaccgaacgctgaatacgcaggcgttgcgaagggcaagaacgtcattgtcattcatttagagagttttcaacaattcctaatcgactttaagttcgaaggccgcgaagtaacgccatttttaaatagcctctatcatgatcaaaatacattaggttttgaaaacttcttccatcaagttggccaaggtaaaaccagtgatgccgaaaacatgatggaaaccggcgtctacggtctaccacaaggctcagtctttacaacgcttggttcggataacaccttccaagctgccccatcaatcctcaagcaaaacggtgactatacgagtgccgttttccatggtaatgtgggcaccttctggaaccgcaataacgtctacaagaacttcggctacaactacttcttcgattcttcctactttaacaccgatcctgataacgtcttacaatacggcttgaaggacaaattattattcggtgaatcgattaagtatctcgaacagctacaacagccgttctacacgaaattcatcaccgtcaccaaccattttccattcccattacccgaaaaagacggtgacttcccccgtgccacaactgataatacagcggtcaacaactattttgcgaccgcccattatcttgaccaatccctagaagagttcttcaattatcttaaagcctctgggctctatgataattcaatgattgtcctctatggtgatcactacggtctttcgaattctgataataaggccttactcagtgtactaggccgcgacccagaaacgtggaccgactacgataacgcccaactacagcgtgtgccttacatgattcacatgaacggtttaaaaggcggtatccaaaaacaatatggtggcgaaatcgatgcgttaccaacaatgcttcacttactcgggattgataataaaaattacgtccaattcggcaccgatttattatcaccacaacatgatcaagtcgtggctttccgaaaccataactttgtcacccccgattacacagtactcgatggcaccatctacaataatcaggatgggacagaagtaactgaaccaacagctaggttgcaaaaacaagtcgctgcttggcagaaacaagtgaaccacgaattgggtttgtcggattcagttaacgaaaagaacctattacgtttctatacaccacaaagttttaaaccagtgaaccctgccgattataactatctgactggctatcaacagcttgtcgatattcaaaataaattaggggctaattcaaccagtttattctcgcaaaatggtgatcaatcgactgttgggctctttaaaaccgatgctccagaattagcgggtgatcaatcaagcctcacggaagtgccaaaatcaaaggccctgaaaaaagagtctgatgcaacagcaactagcgatacggaataatcgtcaaaaaaaaacgcaaggacaacatatattgtccttgcgtttttttgacgttagctaatcacctgcgattgaaaactattaaaaacggattcctgagtcgttgtcatgattacgataatttgaaactgcgctgctaccgctctgacatcatttaataattggcgagtatccgttggtggaagttcatctaagaaatgcttgaccaccacgagttgctggtggcttgctaaaccgcgaatcaattgaatccagaactgatcgactggcggtaattcggtgcccaataaactccgactgcgctttaaatgctgttcaatcaacatttttaacgttggtgcaagctgctttttaggaagcaacaagttatcccaaccggacataaagggtagaatcttaggcgcctcataatcaatgacatatgggggttcaggtgattcaaggctctgctgaatcatctccggttgactaaaatagacctgtccaagtgctaagggttgtttatttagcatttcaatcacgcctttctcattttcctaaagcgagtaacttggcaccaaccaataatgtagactggtgcaattagactgataaatggtgcccatagttgggcgaatacttgattggttaaattctgcttggtgctctcatgcaaaatcggattcaataacgaatgactactaaagtcagtcagatgatttttaaataacggttgaaatgctcggggaccttgtattggtcgcaacggcttttgtagccactgttgattaatcagctctaatccgcgccaatagtaggaattgactaataaccaacctaaaatcactgtcacgcttgcgctgattagtaagcaaagcgccgttaacgtataataattgacaattgtatgtcgcgaccaattcgcactagtgaaagtatcgatatcctgacgcatcttcttaaacgcttgccaagtcaaaataccaattacaagtgcgataacgatagtcagcactaccgcgataaattgatagcgtcccagtaagacttctttactttgaaccagatgtgtcagggggttagtcccctctttagttgtgttaaagttggctaattgctttttcaactggttgaggtcatgtcgttctaaactgatcaagctcagcgcaatcagcatgacgcctaaaaagaggcaatccacgagatagattaacaaagattggcgtaaataataccgaatattagctggaattgatttaatgaagagcatgacccacctcctaataaagatagtgtaaaactaaagtatgaaaattatatgaactctgtggtaaaaattaaaaaaaacgccttaattaagacgtttttttagttcccttaaattgtcttttcttttctttgaatcattaaccaataaacaagtgctgtcagccccattgcgataaacgttgcccccgtataagcgtgaataatcgcgaattgatttaagaccaagtagctgaccaccccaatgacccatgcaatcatggctgtcagatgatatcctttggtgtaccagtatggtccagcaacttcattgagcgcaccaccattgtagtgccgccgtctaataatgaagtaatccaccaagaaaactgcgatttcaggtcctaagaacatcccaatactatcaaggaaggtttcgaaagtggttaaaaatgaggcaacatagaccgggataaaggtcatcaccgttgccaataacgtcacgacccacaatgccggcgttaatttaaatttcggaaaaatattggttaaagccgatcccgcagccattagattcaccgcattagctgtcgtactggtaatcacgatcactaataacgctaaaacacctaaccctaatttggccgcaatggtgcttggatccgcgttgttcgggtcaaaatgatttaacgtaatcgctgtggcaattgtcgccgttaacccgatgaaagcaaaccagaacaggccaatattggcgcctaagaatgaatagcctgtggctgctttcttgttctttgaaaaacgactgaagtccgcagcagcggttacccatgcaaggttaaacgctgctaggatatcgaccgccttcccaaattcaagccgcaagttgctggctggtcgccacgccactaagtctttgaacggtaccattttgaagacaatgattgattcccaagtgactaagataatcactaagatgatgccaattcgttcaatccagcggacggatttttcaccgagcgaaatactgattaaatgcaggacagacataattagaatcccaacaatcaagctcatccggttagtggctgcatcgttgcctgaccagcccatgatttccttgatgatgaagctcactgaagttgctgcaatatacgtattcaccgcagcccaaccgatgaattgtaccacattgataatcgatggcaagacggatcccttcacgccaaatgaggcccgcgttagccccatcgcccccacaccagtttgataccccatgtaggaggccagtgcaagcaagacgtacgataaacagccaacaactagtaacaacgtagacccttgaatcaagccagttgccgcaataatgccgccgataaaccaagtgccgttattcgcatttgcaccaatccaagttgcgaacaaatcccaactgcccatcgttcgtgcgtccttggatactgcatgaattgtttgttgctttgtcattttgataccctccacttggttaattgcattaaaaaaagacctactcctagacagagcaggtccactaatgtacttgttaaccgctcctttgtcagcctcactggactgcccttaaaaggatttatatttataagcattgtattaaacttacttgccaaagtcaactcatgattgttatactcactaataaaaaaagcgaggttggataaaatgctcattcaaaacgtgcacattgagaatcaagaatcattgcggtcaatcagaattgaaaacgggatcattacagcaattgaggcacagctaataccgcatcctaatgagcaagtcatcgacggacatggtcaattggcattaccgccatttgttgatcctcacgtccatctcgattcaactctcaccgccggccagcctgaatggaatgaatctggaaccttgtttgatggcattcggatttggtccgaacgcaaaaaggatttaacccacgacgacgtcaaacaccgcgcaattcaagcactgaaattacaagccagccatgggattcaattcgtccgctcacacgttgacgtgactgatccagacttagttgcgctcaaagccttaatcgaggttcgcgaagaagtcaaggattggatgacgttgcaactggtagcctttcctcaagaagggattctttcttttccaaatggcaaagcattaatgaccaaagctgcccaattaggggttgatgcaatcggtgctattccacatttcgaatttaatcgcgaatatgccgtcgaatccttgaagtttgcttttgaactcgctcaagaatatgatttactattcgacgcacataccgatgaaattgatgatcccaattcacgtagtcttgaaacagtcgcgactctcgcccttgaaacggggatgaaagacaaagtgacggcttcacacacaactgccatgggctgttacaacgatgcctatatgtacaaattgatgcggctgttaaaaatggcggatttaaacttcatcgccaacccacttgtcaacctatttctcggtggccgttttgacacttatccgaagcgccgtggtttgacgcgcgtaaaagaactgactgccaacgggctaaacgtcgcttttggtgaagatgatattcaagatccatggtacccaatgggcgatggcaacatgcttgatgtgttgtatagtggcctactggcaacccaaatcatgggccatactgaaatcatgaatgcctatcgcttcattacttacaatggtgctcgtgcaatgcacgtccttgaccaatatggtctcgaagtgggtaaacccgcccacctgattctaatggatagcgacaacttctacgaggctctcaacaagcgcgccgctgttaccctctcaatgcacgctggcgaaatcatcagtgaaacccaaccagctcaaacgcaattgcatatttaatctaaaaaataggcgtcacgacaatttaaattggtttagctttcacttgtcacaatcgtttcatctgggaaagttaaggtaaaagtggtcccttgttcaggaatactttggacctcaatcgtcccataatgtaactggacgagttggtggacaatcgccaaccctaaaccagattcaccatatttggtattcttacgtgatggatctgctttgtaataccgttcccaaatatttttgacttgttcgtccgtcattccgataccggtatcgctaatcgttaagattgtttcgtggaaaccagcttccgcagtcaccgtaatttgcccattttctgtaaactgaatggcattttgcatgatgttaaacatcacttggacaaaacggtcatagtcggcatagattgggacattctcttgggcgtccaagatgagcgtatcaccggcttcagtcgccttcttctcgagttgctcttgaatattctggatagcttccaccgcattaaacgtttgcgggttcaatttaatttggttagtccgaatcttttcataatccaggttctcgttgactaagcgaatgagtcggttggtttcattttgcattaatgaaatactcttggcgcgcatctcttctggaatcgcatcatattgcaacccttctaacagacccttaacggtcgttaaaggcgtccgcatttcgtgagcagcgtcggccatgaattgccgccggcgatcttcttgccgcttaatttcctcttcagattcattcaacgaatgcaccatctcattaaaatcggtggccaaatcatccaattcatctttaccaggattcttaatctgaacattaaaatctccttcagcaactaggtgggtcgcatttcgtaagcgattaatccgacaaatttgataccgtgctaagacgtaactcaacagaatcccaccgattgtcgatagtaaaaaggcaatcaagaggttcttgcgcatcgttgtcaaaccagatttaacggtttgtagtggtgctgccaccccaatcacgtaaatcagtttgttattgtaaaaaacgggtttgaagaccactaactgttcttgcttattgttattcacttggtgcgaatcacgacttaagctcagccgttgaatctggccattctttaaatgtttccaatattgtttcttgaccgaaactttaggatccggggtaggatacaccatctcgttttcggcgttaaagaaattaaacccaacgtgttgttgggaaaggatttgttgactatcaataatgaattgggtcgacaaggccgcttgagacccctgtttgaaagcttcacgttcaatcacatccgcgtaaccttctagttgatcccaggtgctctcataagcggtccttgtcgaatattgcgtaaacgcaatccccacaataataatggtcgtcataatgacgccgaaaaatgccaacatccattgataaataagcttcattcgcgcgctgcgtctgaatcatcaaatttataaccgacaccccaaacggtctgaatcacttgtggtcctactttttcaatcttttgacgtaacttcttgatatgcgcatcaactgttcgttcgtcaccgaagtattggtaatcccacacaagttctaataattgttcccgtgagaaaacttgacggggatttttagctaacgtcttcaataaatcgaattcttttggcgttaaatctaaaattggtttgtccaataaataagtctcacgcgttttagaactcaacttaaagtgtgttgtttgtacatcaaaatctgaattttcagccgcttgttgtaagttttcttcagctgcttcgacttgttcatcaatcaactcagcacggcgatgtaaggctttaatccgtgcaatcagtgtgattggactaaagggttttgtcacataatcatcagcaccgagttcaaggccaagcacttgatcactttcagaatcgcgcgccgtcaacataataattggtactgtcttcgacaactcgcggattttttgggcgacttgcattccgtctaaacccggtaaatttaaatcaagcgtgataatgtcccaactctctggatcgacactaaaggcttccactgcttcattgccgtcgtaagcgaaatgggcatcccaagcttctttttggaaaaacatactcatcatttctgatacggatttgttatcttctaccattaaaattttcattagaattccttctctttttacgttgctatgtctatattatacagtagataaaccaattacggatgaataatatatgaagaagtgatgaaaatcaaacgcatcacggttcccgtttgcatggtatcgctaagcatgatagcatgttaagcagatatcattatttaggaggccccattttgacttataaaggactagtatttttcgatcttgacggtacactttacaacgaacattctgaagtagatgcagctgttgcgattgcactccgccaattacgcgccaacaactacttaccaatcattgcgaccggtcgctcaccgcttgaaattcaagatgcacttgccaaaaccggcatcgattcattcatttgtttaaatgggagcttcattcaatatgaaggtcaacctgtttataaaggcactattccaacgcccgtgattgaaaaaaccgtcgcaattgctaatgctgctgacgaagccatcgctttttataatgaagaagcaatccggattacggctgtaactcaacccggcaaagatgcctacaagtttgtcaacgcccccgtccccgaagttgatccagactattacttgaatcattcagtctacatgatgttgattctcacaaacgacaatgacaaggcctatacagaaacactaagtaccgacttaacattctaccgcaacacaccgaactcaattgatacggttgaaaaagattgttcaaaacaaaccggtattaaagaattgattcgctcacaaaacttaatgggcatcccaacttatgcgtttggcgatggtacaaacgacttaccaatgctcgacttcgtagactatcccaccgttatgggcaatggtattccggaagctaaagccaaggcaaaatacattacttctaagaatactgaaggtggcattattgaaggtttacgccactggggcttaatttaatcacttaactaatccgcgccataacggctcaatcactgtcatggcgctttttttatcttgacgcttctcagtagaccgattaaaattagaatcatatcacttaaaaaggagttactaatgacacaacattcactctttgccaaaaaacaaatcgacgtgaaccaatttaaaaatagtacactagaacgccatttaaccgcctttggtttaaccgccatgggggttggtgcagtcgtcggcgccggtatttttatcacaccagggattatcgccgctaaatatgctggacccggtgcgatgctgtcttacctgctcgctgcagtcgtctgcgcaatggctgccctttgttattcagaattcgcttctacaattcccttggccggtagtgcctacacatacgtctacaccgtcttcggtgaattaatcgcgtggattctaggttgggcacttatttccgaatacctcttcgcagtcgcctcagtggccgtcagttggtcagcctacttccaaaatctaattgctggctttggattacacttacctaccttcttatcgactgcatggacgcctggccaccctggtggtattaatttaattgccggtttaattacgttattgattgggttcttactatcaaatggcttacgcgaatcaacacggattaatacgattatggttggtgtgaaagtcgctgtcatcgtaattttccttggcgttgccattttctatgtgaaaccagccaacttcaaaccgttcttaccatttggtgctggtggcattctttctggggcagcattagcattttacgcctacatcggctttgatgccgtttcaaccgcatcagaagaagttgtcaatccgcaacgtgatatgccaatcgggattatcgcttcattattgattgcttcattattgtatgccgcagttgccaccgtcctcgttggcgtcgtgcactatacaaaactcaacgttggtgaccccgttgcttttgcgcttcaattgatgcatcaaaactgggttgctgggattgttgccctgggagcagttgccggtatgacaactgtcctactcgttatgacctacggcggaacacgtctgatcttcgccattagtcgcgatgggctattgccacccgtttttgccaaagtcagttcaaaaacacatgtgccagttgcgaatacatggattttcgccatcgtcacaagcatcgtcgcaatggtagtgccacttgataagattgctgaattggtcaacattggcacgttattcgcctttgcaactgtttctctcggtgtgatcttcctgcgcaagttaccattttataatgaattgccacaagggtttaaagtgccactattcccatggattcctttactttcatgcggcttatgcttactactcatgacccagttacaactaacaacttggattgtcttcttaatctggttggtgattggcctaacaatttacttcagttacggctaccgtcacagtcgccaataaaaaataggcgttaagcagttttcataatctgcttaacgcctatttctatgcaatctatcgtgaactatctacaaaaatgcatgaacatccgtgaaaatgaggtcatgttgccagcaagaatcgcgacaattggcactaatgcccacaaccagtacttattattcttccgctgttcaacctcagctttcaaccgtaaattctcattttccatcttaaggcgtgcaatttcaagttctaatttatctttgtcatccatgcaactcaccttccgtcctaatttattaccgccattataacagaatttttcaaaaatctcccacctatccactccaacaaaaaaagccctctaatcttgtggattagaggggctttaacgtgcttttcaaagcatacttctgcggctagctacgtcccgcaaacgatcaactccgtcgctcattcacgaaactaggctagtcctcaaagtataaccggcttgaacgcacttctatttttaacgtactttcaaaagcatcctattccggttagctacacaagtcaaacgattgcttacagcaatcattcgccctgttaggctaatcctcacaggataaccacttttgacgcacttctattttttgtgtttcttgttcagaatcttgtcgaacaagttgttgtcttgtgggttaagtgagtcaccacttgcgactgcaaatgcttttagcgcatcacgttgtttactgttgagggtctttggtgtcacgatgttaactgtaacgttttgatccccattacctgtcccgtggagcttaggcgcacccttaccacgtagacggaagacagtattcgtttgagtccccgctggcacttttagtttaacaggaccatggactgtgttgacttcaatttcatcccctaaagcagcttggacaaagctaattgggacttctgaataaatttgtgcgccatcgcgcttgaattcagcacttggtgccacgcggaagacgatgaataaatcgccataagggccaccgtttgtgccggcttcaccttggccttgaagacgcatttgttgcccatcttcaacacctgctggcactttaaccttaacagtatgccgttcatcttcgtgacctgttccatgacatgtttcacacttgtctttaatttctttaccagtcccgccacagacatcacagacttcttgagccatcatgcggccgaaagctgtttgtcgttcaacttggacttgacctgcaccgtgacatttgtgacacgtttgggcgcttgttcctggtttagcaccagaaccatgacacgtgtgacattctgattcacggttataagaaatcttggtttctttgccgaaaatagcttcatcgaacttcaaatccatccgatattgtaaatctgaaccttgacgaggggcgtttggttgttgccgagcaccgccgccaccgaagaatgaactaaagatatcttcgaaaccgccgaagccttcagcaccaccaaagccgccaccgaagccttggcctgcgccgccgccgaaaccaccgttcatgccagcatgaccgtattggtcataagctgcccgtttttgtgggtcacttaatgcttcatacgcttctgtgacttccttgaacttggcttctgcatctggggctttgttaatatctggatggtacttctttgaaagtttacgataggcctttttaatctcatcatctgaggcgtctttacttatccctaagacgtcatagtaatctcttttatcagccattgtgggcctccattcatatacttacgcgttaaatctatcttatcaaggatagcataattgactgattaaaaaaagccaaggccctagaccatactaggctttggctttttttaaaacgcattattatttgtcgtctttaacttcttcgaagtcgccgtcaacagtaccatcgtcagacttaccgtcagttgcattaccttcagcaccagcagcttgttgtgcttcttgcgcttgttgatataacttaactgttaattcttgaacgatttcactcaacgcatcgcgttttgtcttcatgtcttcaaagttgttttcttgttgtgctttgactaattcttctttagcatctttagccttttgtaattcttcgtcagaaactttaccttcaagttctttcaaagtcttatctgtttggaagattaattgatcaacatcgttcttcaaatcaacttcttctttacgtttgttgtcggcttcttcattttcttgagcttctttcatcatgcgatcgatttcttcgtctgataaaccagagttactcttgatagtgattttttgttctttatttgtgccaaggtctttagcagaaacattaacaatcccgttcttatcaatatcgaatttaacttcgatttgtggcacaccacgaggtgcagcaggaatatctgttaattggaaacggcctaaagtcttgttatcagcagccattggacgttcaccttgtaagacatggatgtctacggcaggttggttgtcggcagctgttgagaatgtttgggctttgcttgtaggaattgttgtgttccggtcgattaacttcgtgaagacaccgcccattgtttcaatccctaatgataatggtgtcacatcaagtaaaacaacatctttaacgtcacctgagataacaccaccttgaacagcagcaccaagagcaacagcttcgtcagggttgattgagtgatcaggttccttgcctgtccagttcttaacagcttcttgaacagcaggaattcgtgttgaaccaccgtttaagatgactttgtcgatgtcgcctgattctagaccagcatctttcaaagcgttcataacaggtgcttttgtccggtcaactaagtctgatgttaacttatcgaattcagcacgtgataaagtcatttccaaatgtaaaggaccgttttcgccggctgagataaatggcaagctgatttgggtgcttgtcacaccagataaatcttttttagctttttcagcagcatcttttagacgttgcatagccatcttgtcttttgacaagtcgataccgttgtctgatttgaagttttcaactaaccagttcatgatggcttcatcaaagtcatccccacctaaatgtgtatcaccgtttgttgataatacttggaagacaccgtcgcctaattcaagaacagaaacgtcgaaagtcccaccaccaaggtcataaactaagactttttcgtctgtttctgtcttgtccaaaccgtaagctaatgctgaagctgttggttcgttgataatccgtttaacatctaagccggcaatcttaccagcatctttagtggcttggcgttgtgaatcattgaagtaagcaggtactgtgataacagcttctgtgacttcttcaccaagataatcttcagcgaatttcttgatgtattgtaagatcattgctgaaacttcttgtggtgtatatgatttatcgccaacagttactttgtaacctgcttcgccgatgtgacgtttgattgatgcgattgtatcagggttagtgattgcttggcgttttgccacttcaccaacttggatttcgccgtttttaaatgacacaacagatggtgttgtccgtgcgccttctggatttgtgataatttttggttgtccgccttctaatacggcaacagctgagttggttgtccctaagtcaataccgattactttactcataaaaaataccctctttttttagatttttagtttaatttattgtgcaacaacgaccattgctggtcttaagacgcggtccttcaagtagtagcctttttggaagacttgtacaacagtatccgctttttgatcaccatcaacagcgaccgtttgcacggcctgatgaatggtcggatcaaaggcttgtccttgcgcctcaatttccttaacgccatgatcttctaaagcatgtttcatatgatcgtatgtcatttgaacaccctttttaagactctcagcactatcatcagttgcttcagttgccaacgcacgttctagattatccaaaacgggtaagacatcttttgcaagtgattgcccatcatattttaacaagctagcttgttctttttgatgacgggtttgaatgtttttaatttcagcttgtgaccgtaagaaactatcttctaaatcatcatatttcttttggagttcagcaagttgagccgctaaatctggcttagctgcatcttcgtcaggtgcagcatcttcgatcacttcatctgcttctaattcaggttcaaatggcgtttcttctttaggtgtttctgtttctggcatttctgctactggcttttcttgtttctcagccttttcttgcttggtcaaacaaacacgctccttttaagattgatcatcatcgaaattcgcataataatcaattaatttcttcgctaactcttcacggaataaatcgagtaacccaatcatccgcgaatagggcatgctagtggggcccagtagtgcaatgactccctgtccgtgttcaccaacgtcataattaacagtcattagactataatgtttcaacagatcgttggccatctcggtgcccaggcgaacctgaacttggctattggcgcctccaggggacaaatctagcaacttggctaaatcatctgaacgattaatcatgttatacaacgacttcagctgggtgacatcggagaactctgaaaaattcaacaagttcatctgaccgccaacaaataagcgctcttgactcgcctttttcaaaacatcgtcgaagatgtctaaaaagccggtcggagaagccatgtactgggctaatagcgccggtacatccgtctttaacttctgactaaccacggttaacggtaagccaattaggtgatcattaatgattcgaatggctttttcgagttcatcacccgaaatcgcttgtggaatggtaaatacctgattatcaactgtccctgcactcgtcacgataatcgccatcacttggtgattactcaacggtactagacgaaaaccagttaaccgaatctcagccacttccggtcctaatgcgattgctgtatagctcgttaggttcgataagatattagccgattgtgagacgatttcatcaatcttatgatagtgctgtccaaatgattgttggaccgttgccacatcaaccggattgagggttgctggttgcatgagatggtctagataatagcgatagccttgcatcgacggtacccgtccagatgacgaatgcgtcttctcaattaaaccgacactttccaaatcagccatatcattacgaattgttgcagaactaacgtgtaccggcaattctgccattaacttcttagaacccactggctgaccactctctgtaaaaagacgaataatttctttcaaaatcattaattgcctttcggtcagcatgtcatcacctctttttagcacttgaatatcatgagtgctaattacaattattaatatagcaagaacgtcaaataaagtcaagaaacgtaccggcttttttacggatttactgaaaatcggtccttagacggagggccttactggaccaaaggacaaaataaaaaacgagccgcttcttagatggaagagactcgctttatgaagtggaatatttataacgtgcttttcaaaccatattcctgtgcctagcgacacaaggcgaatgctcagaatatcccccggtttgaacgcactcaataactatctagcagaaactcttggaagacttcattgcctaagaacttacctgattcagttagtcttaaccaatcgccttcttgtttgaggtagccctttgcaatttgggtggcaactgtttcgccgtaaacattttgtaatggataattgaatttatcttgaaaatgactgatggatacgccttgcatcgtccgtaacccgaggaagagttcttcctccatttgttcggtcagtggcagaacatggcgttcaatgactggcaccttattttcttttaagggttctaggtattgttggattgggccgaagttatggtaacgatccttacctaaatagccgtaagcaccggcaccaaagccaaaatacttttcattgcgccagtaagttagattatgcgcagattgaaagcctggcttggcaaaattactgatttcatattgatctaagccagcccgcttgaaactatcaatcgcggcttgatacatatgtgcttcaacatcttgcgatggtaaatgcaacttgccttggcgcatcaagttatagaagattgttttgcgttcgagaatcaatgagtacgtcgaataatgcggtaagtcgagttcaattgccttattcaaactatccatgaaatccgcttcactttgttgtggtaagcggaaaatcaaatcgatactcatattttcgaagccgaccttgcgcgcgttatcgattgcccgataaacatccgcacttcggtgaatccgcccgatctgttttaaaatctgatcattaaacgactgcacgccaatacttaaccggttgacgccgttgtccttcagaacttgcaatttttcagtatcttgtaagtcattaggattggcttcaaacgtaaactcaccaccctcataaggtaagtattgatgaatcccatcggttaaacgttggagttgtgctggtgataaagtagttggtgtccccccaccgacatagatcgtatcaattggttcgtctgggtattctgccatcactaattgaaactcgcgaatcaacatatcgacataatcatcgaccggttgaccttcaatgaaaaccttattgaaatcgcagtagtaacaaatatgctcgcaaaatgggatgtgaatataagcgcctgccattaatgttgtgcctctaatttctcaaaataagttcgggtatcggcttcgtcttggtggagttggtcaatcaaggcttccgcggagtcaaacttcacttcgccgcgtaagtagtgataccaatccactttcacttgttcaccgtaaatatcgccattgaaatctaataagttaatctccaccgttaccgggttattgctgtggaacgtcacattccgaccaattgaagccatgccaatataccattgaccgcgcactaaaaagcggaccgcataaatcccaattcctggtaatcgttctggtcgttgcgattcgatgttagcagttggaaaccctaattctcgcccgcgtgcttcaccatgcactacttcaccggtcgtttggtaaacataaccgagtaattcattagcttccgcaatcttaccagcatctaaatcctctcgtactaatgtcgagccgattttgacaccattatggtcatgttctgcaactgtcacaatggcaaagcgccctttggcatagtctgacaatgtcgtcatattcgcaatctcttttttaccataagtgtaatcaaagccagccaccactgtatccgcatgtaaagcgactaagtattgatcgacaaatgtttgtggggctagttgtgcaaatgcttcattaaagtgcacgatgtagaaaacatcaacgcctaactccgccatcaattcttgcttgcgctcaaccgttgataaataacggaatgactcccgattggcattgcgataaacaatggcaggatggatatcaaacgtcatcacagctaatagtaaacctttttgaactgcaatttgttttgctttccgaattacagcttgatggcctcgatgtacgccatcaaaaaagccaagcgccaagaccacttggtcagctggcacttgttcttttgaatatggatgaattaattcaatgacacgcatatttttcacctagttttttttaatgagtcccttgattttgtaaatacattttataagggcgataaagatgttgcgctgctttttcaacttgatagagcgccttgatatgcccttgataggtcaacgccacaatctcatcggtttgttctggcaatgtcaagaacacaccgtttaaaagcttggcccattgatcgtcgtctaaagcaatcttcttgtaatcttcaaatacatggtcaattggcaataaaacgtctgccagttcgcccgcttcagctttttgcgccaattgttccaacgtgatacagttaccaatttgaatgccgccactcttaagacgtgtcaaatcggacatcactgcgggtaaaccgagtttacgaccgaaatcaacagctaatgtgcggatataagtcccctttgagcaaccgacaatgaaccggaatgtttggcgcccagattctgcgtcaaattgtggttcaccatccaaatcaaactgcgtaatcgtgattgaacgttgtggccgttcgactggatcaccagcgcgcgcatagtcgtataaacgccgcccattgactttcaccgctgaaaacatggggggaatctgaattgaatcgcccagaaaactagcgagggtctctttgattctctcagttgaaaaaggttctgttaagcgcgcctcttcaacgacttcaccatctaagtcttcagtcgttgttgataagccaagggtgatttcacccgtgtagactttaccagaatgcaccaattgatcaacaaccttcgttgcttgaccgatacagattggtaacaccccatcgacgttgggatccaacgtgccagaatggcccactttcttcatgtgtaaaatgcggcgcactttaaacacacaatcgttactcgtcatgccgcgttctttatataagggtacaatgccgtccataagtaatctcctttaagtattaactaaactattatagcatagagtgtgaagtcgaacgggattagctttatgatgctgctcaatttattatcaaagcacaaaaaaagatgggacaaaagaaactcttgcccatcctcgctcaatgttgttttattagtaaccttttttactcagaaaaagtgagtcctttattttgaaaccgactatcgatcctagcactttttaattcgatcgcaaaaataatctctttttcctgttcttctttggataaactctcaacatagcctggtacttgtttttgataggcctctgctatatcactaaaacgatactgagttcggtataccttgagccggttactcgtgattcacaattcttcactagtcggtagcgtaaaaattgcggctcgccccaaatcgagttcactgactttcggcacttcggggtcggtgccaaaataccagacattcggtatcccatcaagcgtgacaaaattaatctgtcgactagacggttgtcccaggttgttcgctgtactcagcaccattgtattaaactgcttaacatatttacgaaactcgcttaagttattttgatacagctctgaactaaccggctgactatcaatataagcaatcgcatcatcaatcgtttctaatgccgggttagcctctaaataataaagaatctgtggaataatgtgggatatttctcgttgataataataaaactgcaaccagcgattagatactgataaggcctctgtataacgcttaacaattcgccgccgatagcgttggacgatatattttaacggtcgatatttaatcaacttttgaaagagcgctaaactcaatagaaagattaaaattgcaactaaaatattgattttaacaatcccccatcatcggccagtgttcatactgcataaaaacattatacagtatcgtcaaaaaaggcgtgaccaacgccgcacaggcaattactaatcgccgtttaaaaacgcggcgtttatgggtcatatcttcgattattttttggcgttctttcatggtccgctcacgagtaatcatctcatcaatcaccacttgatctgcttcagaaatcatcggcaccctcctcaaaagcatcaaagcgttggcgtaattcatacgtccccacatcagcaaaatcagaaataatgatattttgtcgctgttttcgcatgtctgctgcaccatatttagcggtatacatctcctcagcccaagcgagacgtttctgtaaccgctgttcatcaaatgttttaacgacgccttttctaatccgatgttatttcactttattcattaaataaagactgataaagaaggctgcaaaagcaatgatgtagagcaagaaaacataattggttcgttgcaatagttgtttaaaagctacgcgattaatcggaatgcgcgtttcacgagttagatagagcgcaattgtactcgaggtcggtacaaagcacattaaccagccaatcccaattaacactgattgacgcaaatgatgacctgttttttgagtggtaaaaaaccaatcaattgtaatctgatcttcgcttagctgatgacgaatataatctggtttactcatttgaatccttcccttctggttttccagtgacttcagtcgaccgttttggtgatttccatacacccgcatctttacctcgaatgatttggcgaatcgttggcacaatttcgactgctacggtatatgtattaaccatccaataaatcaagatataccaaggcgcaaaggcgatatacttcaacgaacggccgccatcgttaaagtaagacgcttgtaccagctgaatcaaccctaccaatatctcgattgtgatgaaaatccctgaaaatgacagatttgagagtagccgatgccaatcatgattaatcagataacccatttgaagcactacaaaggtcaccatactcatccagtaaaataacgaccaaataatactcaaaccataatcgataatacttggcaccatcgaaaagtgcttaatcgggtgccgtaaaatgctaaacgattttgttaagagcacgtaaatcccaccggaagtccatcttcgccgttgcttaacgagttctggtaatgtttctggcacatccataaaaaagcgaatgtgcggtgcaaaatatgcttgccaccctgcagtctgcatatcccaagaaatcgcaatatcttcagttggttgttctgcctgccaaccaccgacatcgatcaccgctgccttgcggtacatcgtattcgctccagaaaaggcaaacagcccaccgtaagaaagttgcgaccgtttaattaagccaataattgaatttaattcattttgttgagcttctgcgactagcgttgtcttattaatcgacaacatattaccagtcacggcgcctaattgagcgcccccttcccgctcaagataatacatatacttccataaggcatccacttcgggtttcgaatcagcatcgttggacagaataaattcacctttagcaaatcctaaagcactattaaaacccgccgcttttccgcgattattaataatcgtgagcgttcgcaagtgctgcccatattttgcttgtaattcttctaaaataatgccagttctatctgtcgagccgtcattaacgacaatgatttcatagcggtcagttggataattcatttgtgtcgctaaatgatcaatcgtcgcctgaattgacgcctcttcattgtgggctggcactaaaatcgtaataaatggcgtctcctttttaagatagcgtggttggtcagccttttccatcaataaccaataatataaactagagacaataagcgataagcccccaataatcggatacgaaacgagcgtatagattaatatttgagttaaatagtctgtcaacaacatgtaagcgtcctcatttcagattggattttaatcagttaacaatgaattcacattatataactcacttgccgcgctaaaccataaaatatctgccaataacaatagtttcattacttcaatagtaatatggtgcaaacgactaagtcaatttaatagattatcgtttccataaggccattcaaacaaaaaaagagccccgctttcgcggggctctttttcacagtttaacgctgtgcttcatcttcgtgtaacttacgtaaaagttcgtcgatatgttcaccataacgcactgaaccgtcttgttcaaaggtgatttctggaatcttgtacaacttaatccgttggccaagttcgctgcgaatcaatcctttagctttatctaagccagcttgtgtcttttcagcgtcacttgctaagccagataaaatgctgtaataaactttaacatgttgtaagtcaccactgagattaatatcagtgattgtgaccccttcaactcggggatcacgcactctttttaataaaatgtcatttatttcgcgttgaatttcttgttcaacccgaccaacacgatgtttcattgcttgtcctcctgtaaattaattatttaacaggtacttcttccatcacgtaggcttcaatttgatcatcaatcttaatatcattgtaatcttcgattgtcacaccacattcaaagccagttttgacttctttaacgtcatctttgaaacgtttcaagcttgaaagtttaccttcataaatcacgataccgtcacgaattaagcggacaccactatcacgttggataacgccagtgtcaacgatacaaccggcaattgtcccgatcttagaaacattgtatgtttcacgaacagttaattggcccgttactttttcttcgtaaactggttctaacatacccttcatagcagcttcgatttcttcgattgccttgtagatgattcggtgtaaacgaatatcaacttgttcagcatcggcttgaatcttagcttgtggtgttgggcgaacattgaacccgatgatgatggcgttacttgcagcagctaatgtgacgtcactttcgttaatcgcaccaacggcttcatgaataatattcacgcgcacgccttcgacttcaatcttccgtaaactaccagccaaggcttctgttgaaccttgtacgtcggctttgataataacgccaacttcttttaattcgccttgtttcattgtttcgaacaagttatctaatgtgacagggtttgaacggctacgttccttcaagagcgcacgtttggcacgttcttcaccagcagcacgagctgttttttcgtcttcaaagacaacaaaacggtcagctgcttgtggcacatcatttaacccagtaatttcaactggttctgatgggaagacttccttcacacgacgaccgcgatcatttgtcatgacacggacacgaccaaaggtattcccaacaacgattggatcaccaatcttcaatgtcccttgttggatcaagagtgatgcaacaggtcctttacccttatcaagacgggcttcgatcactgtcccaactgctttttgatctgggttagccttcaattcaagcacgtcggcttcaagaagcaccatttcaagtaattcatcaatgttttcaccagtcttagctgagatcttaacaaagatggtatcgccaccccagtcttcaggaacaaggccgtaacccatcaattgttccatgacgtgatctgggtttgcgcctggtttatcaatcttattcaccgcaacgatgattggggctttagcagccttggcatggttgatggcttcgattgtttgtggcatcacaccgtcatcagcagcaacaactaagatgatgatatcagtgatatcagcaccacgcgcacgcatgttactgaaggccgcatgtccaggtgtatccaagaatgtgattaaacgatcgtttaacttcgtttgataagcaccgatatgttgcgtaatcccaccggcttcaccatcagtcacgtgactgttacgtaagttatccaataaggttgtcttaccatgatcaacgtgacccatgattgtgacaactggtggacggctcacaaggttggcatcactcttagcttctgtttcaaatactgaatcgatatcagcaatatccacttccactttttgttctgcttcaatgccgtaatccgttgctaataattcgattgtatccttatcaagtgattggttcatgttaaccataatccctaacatgaataacttcttgatgatttcagctggttcacggtgaatcttcttagcgatgtccgcaacgttcatgccttcagagtaaactaatacttctggtaatggccgttctttacgttgtggcatttccttcttagcagcattttgttcagctaattgttgcttacgggtcttcttacgtttcttattgaaacgttgttgattgttaccgtagctgttatacccgccgccacgtttcttatctggaccaaagttctttggcttgcttgctgtattgtttgatgctggtttagcagcactcaccgtattagcttgcattttttgttgcatttcttgtgccgaaactggccgactttggttcgagttgttattaggacggctgtttgtattgtttgctggacggccgttgttgttgctgtttgcaggacgattatttgtcgtcgttgggcgtgcgccggctggcttgttgccggctggacgactgctgttattaccgtttggtttagcagctggccgtgggcggttactttgttgacggcgtttcttttcgtctgcttcgcgttgttcacgttgttgttgaatgcgttcttgcgttctttgacgacgtgcattagcttgtgagatttgttcttgcaagctcaatggttggtttgacccagctggacgcgtattgccgtttgtccggttagccgcattattgttagggcgaccattattaggacgggcgttattgttgttaggacgaccattggcattgttgcggttttgaccatttgatgcttggccattccggttgccttgtgggcgttggttgtttgaacgaggtgctggtttgctgctagcttctggacgacgacggatagcggctttgttaatcttaatcttaccgttatctgttttttcgcttgcctttggtgtagcaggtgctgcggctggcttgctgtcagttgtcgttgcagctggttttgtttccttatggaagatggctctcaaagctttttcttgattgtcatcgatagttgccatgtgattttttagatcgtaaccttttttaacggcagtttctaaaagatctttgctggcaacgttaatttcttttgctaattcatagatacgttttttacccatatcttcacgctcctttattatcccagtagcgttatcatctttttggcaaacccggcatcaacaaccgcgatggtggctctatgtaatccaattgcttgggttagctgggccgcggtatacgcttttgtttccgggatttcgtagaaatgactcttatcagtcaatttcttctgtgtcagttggctaatgtctgagccgataaaaaccaatttcgctttttgctgctgaatggcttttaggacttgttcttcaccactgaccagttgccgtgctctcatgcaaatacctaagagttgtaataaacggtctggttgttcactcattttcgttctccaaataattctagccgagccttttgatgatcaacatattcgaataattctgtataaaatgattctgcaacgtcaatcccaaacgtcttttctaaaattttcttgctttgggcggtcttgattgcatcaggttctagtgaaacataagcgccacgacctgatttcttaccagttgggtcaatactaatctcaccttcggcagtctttacaatccgcaccatttcttttttaggcttcatttcttgcgaaataacgtcttttctcattggtacttttctttgtttcatcatgaacacctcacttattcttgtggttgttcttcagaatcaacagcagaatccgttgcttggtcttcgaagccttcaacagcttctgttgtttcttcttcaaaaccttcaacgactgcaccttcatcttgactatcgtcttcatcaacgaattcgacttcagattcaggtttgatgtcaatcttgtagcccgttagcttcgcagctaaccgtgcattttgaccttttttaccgattgccaatgacaattgataatcagggacgatgactgtacatgtatgttcgttatcaccgttaaattgaacagcgatgacttcggcaggattcaaggcattggcgatgtagtctgaaggatcttcttcccacttcacaatgtccatgttttcgccgtgtaattcattaacaactagttgaacccgttgtcccttaggcccaacacaggtgccgactgggtcgacgttggggtctgttgaacgaacagccatctttgtccgatcaccagcttcgcgagcgattgagacaatttcaacggtgccgtcataaatctctggaacttcttgttcgaataaacgtttcactaaatcagggtgtgtccgactaacaaagacttgtgggcctttagttgtattttccacttttgaaacgtaaaccttaatccgatcatgtgcttggtattcctcgtttggaatttggtcttgcttgcttaaaacagcttcgatcttgcctaagttgacatagatgaacttgttatcgcggcgttcaacgaccccttgcataatttcgttttcgtattggctgtattcattgtaaatgatacttctttcagcttcacgaacccgttgcataatcacttgtttagcagtttgggctgcaattcggccgaagtcttttggtgtgacttcaaaacgaattgtatcgcccacttcgtatgccttgttaatttccaaagcatcttggtagctcacttcaagacgtgaatcaaacacttcttcagtgacttctttgacagcatagacgtggatgttacccttcttttgatcgaattcaacttccacgttttgtgcttgaccgtaattccgcttataagcagaaacaagtgctgcttcaagggcttcaataacgatctcttttttaacgcctttttcttgttctagcgcatcaagtgcacctaacatttccttgctcatgtaactagcctacctttactaaaattcaattgctaagcgagctttggcaatttccttacgattaaacgttacttctttttgacgcgttttaattttaatcactaaagttaaagtgtcatcatcaagggcttttagtgtaccttgatagattttctcgccatcaacagcttggtataacgagatatgaatgtattcgccaagtgctttttggaaatcggcttccttctttaaaggacgctctgcaccaggtgatgaaacatctaagaaataagcctgcggaattggatccgggtcgattgaatccagtttctcacttaacgcatcgtttactaaggcacaatcttcaaggtcaatgccatttggtttgtcaatgaagacgcgcagataccaactgctaccttctttaacaaattcaatgtccactaattcaaaatggtgttgatcaagaatcggcacgatcagatcgtgaactgtttccacaacggtactcaaatgattccctccaattcatttttatatttcagattagacgtgctccaataaaaagagtgagcatttctgctcactcgctctgaagtatctaattactgataacaatataccatatttttcatgaaaatacaaacaaccgctttaattttcagtggttgcgacgctattttgcgtcttacccgtcgtcaagatttcatggaagttttcaaaactaatctcgaccatgttcttgagggcttcatcagtattcgaaccaacgtgtggcgtcaacaagacgcgggggtataaatcaatcaattcttgagtggttgcatctggaacaggttgatctgctgggaattgcttgaagaagatttcgccttcagctggtaacacgtcagcggcgaatgcaccaagttgatcagctttcaaagcatcgataatcgcacggttatcttgcaattgaccgcgggctgtattcaccaagattgcatcgttcttcatctttgcgattaagtccgcattgatgaattggtcgttttgaccagcgaagtatggaatgtgcaagctgacaatgtcactttgggctaataattcatccaagctgacaaaatcaagcacttccttagcgatttctgatggatataagtcataacccacaaccttggcacctaagcctttgtataactttgcttcggtgtagccaatcttgccagtcccgataatcccaaccgtacagttgcggacttctttactgaacatcactgggctcacacggaaatcatgatgggctgtccgattcgttgtgtaagtggtgtgacgcaacaatgacatccctagcgtcaatgccaattcagcaatcgcgtttggcgagtaggctggcacgcgagcaacttccatgttgtacttgcctgctgcagccaaatcgatatgaccgtaaccgactgtccgggtaaacacgtaacgaatcccgtattcattcaacttcgctaagttttgcgcatcagcggtacagttggcacgtaacaagaccgcgtcatgccccttagccgtttcgatattgtcgtgagtcaataagtcttcaattaacgttaaatcataatcgtagttgttatatttattgaacgtcgccacttcattcggacgaacgccgtaacaagcaattttaaacatttaatttccctcttcctagaaaatcccgatttggttaatcacttctaaaatcactaaccagactggcgtcatcacaacagctaagaccgttgataataatgacgcgttcgatgccaagaccgcatccttgtcaaaactaatcgcgtaagcagcggcgaccgttgccgttggcgttgccatcatgatgacaatcgttgccaaactgatgtagctgactggtaaaatgtgagtcattgttaagatggccaataacacgatatttaaagcaggtactaagatcactttgttaatactataaagccatgatgtcttgtccgaagcagcttctttgaaactgatttcgccaagtgttgtcccaattgctaaccaagctaatggtgaacataaaccagctaagtacgtcattggtttgaacaaccacggcgctgtttgatcaattcgtaagaaagccactgaatgcccagcaaccgccacttgtggtaatgcgccttggattaaccagatgattaaccccgcaaatgtggcgatcacgattggatttaagaacatgtttttcaagttcttcgattccatcttcaagccactcatcttgatgtatccatatgagtataagaacacgcgataaccaatgttgaaaattgagctatacataacccctttagctccgaaaacggcgccaacaattggaatcccgaagaacgttgttgaaccaaagatggtcaacacgcgtaatgtatcttgttgatcacccttaaaacgtaagtataacggttttgaaattaaaattaaaataatatagatcaagaagccccaaactaaaacgttgatgccttcttttaaagtcttcccattaatatcttgcatgaatgagttgaatgccaaagctggtaaagcaaccgttaaaacgacttttgacagaatcttcccaaatttatccgtgaagatctcgcgtttgcggcagtagaatcctaataaaataataaacactgtcgacgtgatcgaactcacaatatccatgttcgtaaacgtcttcgttaaaatatcgccaatactcatctgtactctcctctgttataacatttagtccgctgtattataacacggacaactggtatcgattataacaagaaagtaacggaaaagaaatagggcaaaagaaaaagagtgaaaaataacttcactctttctcagacctaaattttgtattcattttcattacatgctatatattaattatctaaactgccaaggaggccttctcatgcccagacaaagcatcttcaacatgtctctttccaaaatctaccccatgctcgtccaaaaagccgaacgcaaaaaccgcacccaagccgaagtcaatcagattatccgctggctagccggctacacccaaactgaactcgaaacccaactctcaaaagacatcccctaccaaacgttcttcgaggaggcaccacagatcaatcccaattgtgcgctaatcaccggcgtagtttgcggtgtccgtgtggaagatattgaagatccgctgatgcagaaaattcgctggttggataagttggtggatgaattggctaaggggaagacgatggagaagatactacgaacctagtaaaaaagagccttagtagactattttgcatagtctactaaggctcttttcaataaagcatactagtcctttggtgccggatacttttcagcattcttaatcaatttttcattgataatctcatcaatatcgaggcccaaattgtcagccatcatgtaactatagatcaacacatctgccaattcttctttgacccgttcaatatcttgaacgccttcttctgccgtcttccattggaataactccaataattcagaagcttctagtgagattgacaatgccaaatctttttcattatggaatggtcgccagtgtcgttcatcccggaatgcgttaattttttccatacttgtttttgtcatcattaaattcctttcttcagagcagcccttaattcatcatcaactgcgtaaatatataaaccattaacaccacgcgatagcagaacattcaattcattgcgtaacatgtcctcagaaacatcttctttggttccgtcttctaaagttcgacgctgcgtcgctttactattttcactggccgttttatcaaaaataatacgtccatttcgatacttcacagatggcccaatgatgacacccgcataattcaagtcaaaaccttgaatcgtaaaagtagagccaacttcgtcaatcgtctgtggttgttctgcccatgctaattttttattacgtcttttctgatccttgtcgtcaactggtacctgtaagttccacggcatttgccaatcatcaatcttaacgtaccatggatgaccattattatcttttccattcacatatttccaatcaaacgttgctagaatacgtgaaataccagaatcctcgttcttagctttagtttcaattgcgttttgtaatgcttgtggagtgtcaaacaacttaatctcatagcctttttcgtcatgtttaggtaacggtttaaccattcctcggtcgattaaacctctaatccatccaatggttgccgctccagcattaattctgagctgtttatttaatgtgaccaagttgtcttgttgttcaacctcatctaaaagattatctagctgaataggttcccaatactgttcccgcgacagtatttgctttttatcaaagactgcgaccaccactcgtgcacgtttcaataaatcatcaagttgatttttcccagtatatgattgctttccttgagttaagagtaagtgtgcttcatcgacaatgacaacatctaccggttcgtttactgaatatttattgataaacggcgtcggttttaaaactgtcttttgcttatcactcgtgtaaatatctaatttttgagcaatttcctcgtaaactttcaattgctgatcatgattgactaacaagaactggctagtccctcttaaaatgggattttctgattcagcttttgaaagctgatttaattcataaaataggctactcatcaacactgtcttaccagaccctgcgtccccttcaacaatgattaacttgcctttttctgtccggttcttcaaatttgtttcaatcgttgcaataatcttatctttagcatctaattgttcatccgttagcttatgaaatggtgaggctttaaaaagcgccgaatcacgaatcgttctttctaacggaaagagtcttttatcaaactttcttagtttaagccagatttcggaaaaaatcttttccatttcatcatgcgaataataaagattctgttgatttgttcggcggttattgactcttttgacaacatcaacacttgccatgtattgcatcattttattttcaatatctagcgtcatcgatttattaaaatgctcatgaccaatcacatacatttcagcggtgtttgaatggtttaattcccaccaatctgctctatctttcgaatcattcgttatgtgttcgactgtccgtcgtttaatatcagttgtttcgcctacatagaccgaataattatcctgtttatcggcatccttaacaatgtatacagttggatatttcaaaatataggtttcgtcttcttcattaatttgcatttgatcaagtgctttttgattataggcagtgtcataaataattggttttaaatgggacatttaaaattcctccgacagttcaacttaactaaattatactatttatcgataaccattaaaatagcccgcctaaattgcattcacaatctagacgggctattttaattacatcatatcaaacaacgataattgattttcatcaggcaagtcattcaatacgttattttctgttaggtattcgatcagtgtcttggaaactttcccacggttggataagtcttctttggataagaatggcttttcttcgcgggcggagacgatttgtttggcaacgttgccgcccaaacttgggacggcgcggaatggtgcgagtaaagtatggtcgtcttggatcaagaagtcagatgaatctgatttttcgatgtcgaccatcttgatgttaatgccacgttccaaacattcgttagcgatttcgaggaccgtcaacaagttcttttccttggtgctggcttccatccctttatcggtgatttccttcatgcgggctttgacgccttcttttccttgggccatggccacgaggtcgaaatcttcggcacgcacactgaagtaagcacagtaatagataattgggaagtagactttgaagtaggcaatccgcaacgccatcaaaatataggcggtcgcatgggccttggggaacatgtacttaattttcaaacaagaatcgatgtaccagtctggcacattttcgttgtcgcgcatggcttgttgccagtcatccggaatccctttacccttacgaacccgttccatgatgttaaacgacatgctatcgtccataccccagtgaattaaatccatcatgatgttatcacgacaaccgataacgtcttttagagtgacaacgcctttgttaatcagttcttcggcattacccaaccacacgtcggttccatgagaaagaccagaaatttgcagtaattctgagaacgtcgtggggtgcgtttcttcgagcattccgcggacaaaccgcgtcccgaattctggtataccgagcgtgcccattttcgaattaatctgttctggcgttaccccgagtgaatcagtgccggagaacaaggccatcacaccaggatcatcggttggaatcgtcttgggatcaatccccgataaatcttgcagcatccggatcatggtcggatcatcatggcccaggatatcgagttttaagatattatcatggatcgaatggaaatcaaaatgggttgtcttccaggctgcatcttgatcgtcagctgggaattggattggtgtgaaatcatagatgtccatgtaatccggcactacgatgattccggccggatgttgaccggtcgttcgtttaacgcctgttgagcctttggcaagacgatcgacttctgcgccgcggaaagtttgttcggtatcacgttcgtaggctttgacatagccgtaggcagttttatcagcaaccgtcccgatcgtcccagcgcggaacacgttattttccccgaacaagactttggtgtagttatgcgcaaccggttggtaatcaccggagaagttcaaatcgatatcgggcactttatccccgtggaagccaaggaaggtttcaaatggaatatcatggccgtctttatcaagtggtgtcccacattcagggcagtccttatcggctaaatcgtaacccgaaccgacttcccctttggtataaaattcggagtaatgacagttgggacagcgataatgtggcggcaatggattaacttcggtaatcccggtcatcgttgcgactaaactcgacccaacggacccccgggaaccaaccaagtacccatccttaccactcttatacacgagcttttgcgaaatcaggtagataaccgagaaaccgttcccgatgatactcttcaattccttatcaaggcgggcctgcacgatttcagggagttcatccccgtataattcatgcgcacgattcatcgttaaggtttgaatttcatcttcggcccccgccatcttcggcgtgtacaacttatctttaaccggtgtgatttcatcaatcatatcggcgatttggttcgggttcgtcaccacgagtttttgggcaatatcggcaccaagaaaatcgaacgccgtcaacatttcatcggttgatctgaaatgaacatccggtaattgtgaccggttcagtggattggcaccacccatcgagtgaatcaaaatcttccgatagattgaatcttctggattcaaataatgggtatccccagttgcaaccactggtttatccaattcagcaccgagtttgaccatgttgcgaatgatttcttcaagcgcccgattatcgcgaactaattcacgttctaataatggtgcgtaaacggcttttggcattacttcgaggtaatcgtaatacttcgcgcgatcgcgtgcttcttggtagcctttttgcatcatcgcttcgaagacttcaccgctggcacaagctgaaccgactagaatgccttcacgtaaggcatccaagcgactctttggcaaacgcggcgtgcggtaatagtattcggtcatcgatgctgaaaccagtttaaataagttcttcaacccagcttgggtttgcgccattaaaatcgcatgcgctggccgtgcttgtttatacgcatcgccaatcccaacgcgatcattcagttgattgacgttgaccatcccatacatctcggccgcttcggtttctaatttgtataacaaataaccggttgattcagcatcggcgttagcacgatgatggtgttccaagttaattttataccgcttggttaacgtatcgagtttatgatttttgtattctggatgaagcatccgagaaacttccaacgtatcgatggcgggattttcaatctgaccgaggtcgttacgaccatagccagcattgataaagcccatatcaaacgttacgttatgcccagctaagacagcatcgcccgcgaattctttaaacaacgctaggacttcggcttctttcttagcaccgtgcaccatttcattggtgatactcgtcaattgcgtggtgaaagctgatagcgggtgaccgggatcaataaattcatcgaacgagccaatcacttcgccatctttcattttgacagcggccaattcgataatcgaatcgtaaacggctgacaatccagtcgtttccacatcgaaaatcacgtattcagcatggtcgagtgcttcatcgcgcaagttatacgcgactggcgtgccatcgttgactaaattgacttcgacaccgtacaaaatcttaacgccgttcttcttccctgctgcataagcatctgggaaagcttgtaagttataatgatcggtcaccgcaatcgcggattggccccatttagcggcttgttgaacgaagtcgccaatcttgttggtcgcatccatttgtgacatattggtgtgcaaatgcagttcgacgcgcttgccattttcagcggtatcttggcgtttgggatggctaacttcgaccaaatcattggcattgaccacgagatcgcgcatgaagttatcttcttgaacactcccgcgcaccttgaaccacatgcctttatcgatggctgcgaagatactttcgtcgccgttatcccgggagaatttcttgaccgtaaatgatgatgagtaatctgtcatcttcaaaatcaagagctggcggccagaacgtaaaacgcggacttctttatcaaagacgaacccttcaatgacaacggaacgttcttcttcattgattgtaatcatctgacgggttggttcagcaggatttaagccgcggcccattgaaatcgggccatcgactggtttgccttctgattgacgtttttctttgagtgcttcatttttcttgatcgcttcggctgccgcttgtgcgcgggctgcatcttgttcagccttcttcgcttgaaaatcttcgattgccttttgtgaggcggattcgtcaatcaagggttgaatcgcaaacttgggaaaaccaagccgttgataaccagcttggattgtcgtttgcgcttgatttaagaagaacgtcttcacgatgtcgttttcgacaactaaaaagacgttgcgaccgtcgatatagggggtctctttttcacacaattcgtgcaacattgaagattgaatcccactatggttaatgacgtattcccaataagctgctaaaacaccgccgtctaattcagttgcatcggtcgaaatgtcgaccgcgatatccgcaattgatttgaaggctgcttctagatactgttcaaacgttgtgtaaacagcatatggcaaaacggattcgaaatgtaatttaaaagtccaccgtttggatgtttcgtggacaacgacttgttctacttggccagttttgaagccaggataattcgcaacatccgcgggtaaatcaatttgttctaataatttttgaaacagtgcggtttgatctaatgccacaaaagggcctcctcatattcagaaagttaaataaaaggggctaggacaaatatcattctgtctcagccctttttagatgtccgaacatttataatgtaaacgtgctttttgaaactgcctcttgcgcttaactacaatccgcgaacgatcgacgttgtcgctcattcacgaattgtagttaatgcttggagccaaacggtttcaaacgcactctattcctaaacgtgcttttcaagctaactttctgcgcttagcgctgggaatcaaattatcgactgcgtcgttaattcgcttccctgtgctaatgctcaaaagttgaccgagcttgaacgcactctattcagcttctgttgtctctgaagccaataggatacctaatgaattaatcaattcatccttcttcacttctagggtttcacccgtcttacgtaatttaacttcgacgatttcttctgctgcttttttaccaactgtgatgcggattggtaagccgattaagtcactgtcggcaaacttaacgccagcccgttctttacgatcatcaactaagactgagtaacctgcttcttcaagtaaattttcgatctgttcagctaataagacttggtcagcatctttgacattgaccggtacgacatgcaagtcataaggggcaatcgcgcttggccaaactaagccgttttcgtcagcttgttgttccgtaatcgctgataagaggcgactcacaccgattccgtaagaacccatgataattggtttcgcacggccattttcatctaagaaagtggcaccgaattgttcagtgtaacgtgtgcctagtttgaagatatgcccaatttcaatcccctttgtaaagtgcaagttcccttgaccatcaggtgatgtttcgccttcttgaacgaaacgtaggtctgaataatcagctacggtaaagtcgcgcttgctgttgacattcgtgaaatggtgatcggcttcattcgccccaaccacggcattcaccatggcttcgacactgtaatcagcaacgatttgtaagtcttctggcgcgttaactggtccgattgaacccattggtgcgttcattgttgctaagacttgttctggggttgccatttctaagaaatcagcatctaagaagttcttcaacttcacatcattaacttcaaaatcgccacgcactaagaccaagaccggttggtcgtcagcgataaagagaacactcttgatgatttgttgtgctgggacgtctaatttagcagccacttcttcaattgtgtgggcatcgccagtcgctactttttcaagctctaattgcacatcacttgagttttgcttaggacggacactcgttgccatttcaaggttggcagcataatcactttggtctgaataaacaatcgtatcttccccaatttcagcaatcgcagaaaattccattgaatccttaccacccatggcaccggcatccccaacgattgcgcggaagtctaacccacagcgttcaaaaatgttggtgtaagcttggtacatttggcggaaagttgtatccaaatcagtttcattggctgagaatgaataagcatcttgcatgatgaattcacggccgcgtaataaaccgtaacgtggacgatcttcgtcacgatacttcgtttggatttgatataacgttaatggtaattttttgtatgatttgatttcattgcgcaccaagtcagcgaaagtttcttcgtgtgttgggcctaagatgaagtcgcggccatgacggtccttgaacttgaataagttatcgccataggtttcgtaacgacctgattcttcccacaattcagcaggtaaaatccctggcatttgcatttgaacggcgtcaatcttgctcatttcatctttgatgatggcttggatgttttccaagacgcggaatgctaaaggtaagtaactgtaaacaccagcagatacttggtgaatatagccggcccgtaacatcatccgatggctcttagcctcggccgagttaggcacttcctttaaagttgggataaataattttgactgtttcataatctgttatgcctccaaaaataatctaaaagaaaaagcgttgaatatcgttccatgtaaccaagaccattaagacgaccatgatgccgaccccgacaagggtgacaatgccttctttttccggtgagatgggtttaccgcgaatcgcttcaatcacgttgatcacgagcttaccaccatcgagggctggaattggaatcaggttcataatccccaagttgacggataagaacgctaagaagtagacgagcattgtaaagccttgactcgcgaattgcgtcgtcattgaatacatgccgactggtccggctagtttattgagtgaaaaaccacccgttaagaatgacccgagaattttaaaaatctgggtcgcattcgcccatgattgggtgaagccatatttcaacttagcccccacgctatggttgagtccagctgtcacaccaatttggccgactttccccttttgcccctcgactttcaccgctttaggtgtgatttcgagtgacttagtttgctttgcccgtttaacctggacattcactggtttattcggatattttgcaatcaccgagctgaaatcagtaaacgtcgtgacttttttgccagcaactttcactaaccggtcatccattttaagcccggctttttgtgctggcgagtttggcatcactgtgccaacaatcgctttgttttgtgggacgccaccgtttaaaaaagcaaagagcgcaaacgccacaatcgcaaggataaagttgttgaacggtcctgcgaagttggtcaacatccgattgattaaactagccgactggaattgaacatccacgggtgcgatttgcacttccgttccgtctgattcaacaatcgttgcatcgtgactgaccgaataacgctttaattcggattcgtcaccactttcatagccttcaatccataattctttttgcaagtcagtttttgcaatctgaaatgggacaccgtttaacgtggttactttgtcacttgtattaattttttgaacagtttcttgttcgtctaacagcaaggttgcttgcgtgccggcttcgatttcagattcatcatccgccatccccgccatgcggacatagccgccaagtggtaaccaacgaatcgtataagtcgtgccatttttgcgcgttgcaaataattttggccccatgccaattgaaaattcacgcaccaaaataccagaacgtttcgccatgtaaaagtggccaaattcatgcaccactactaaaatgccaaatatgataataaacgcaataatcgccgccaatagagtacgactcccttctaaatgcgtatttcaatactctcatttgatatgaactgttatattatatcacgaattccttagaaacaagaaaagcgtttagcgcaaaccaaaaagttgcgctaaacgctagataatattgacttttaaaaacgtgctttttggttgcaacaacttccgcttaatctaaaaattcaaataatcctaaaaccgggattattcgaatttttgtattaatgctcagttgctaaccgccacaaacgcactctaaatcatgccaaacaagtgtagtagcggtaagacaaacaacatgctgtcaaagcgatctaagatgccgccgtgacctggtaagattttacctgagtctttaacgccataatagcgtttgtaagctgattcgactaaatcgcctaattgaccggcaattgagaagatcaacgttaagcctaacatgacaggcattgaataagcttgtgggaagaagtttaaataaatagctgcgaccactaatgctgataatgtcccgccaattgaaccttcccaagttttattggggctgatagctggccacattttattcttaccaaacatccgtccgaatgtgtaggcaccgatatctgtcatccagatgaccaataagatatacatcacagtgtcaaaaccaccaatatttcgcgttgcggctaaataatggaagcctaagccgatatagagactggctaaggttgtgacacccatatcatcgaagttaacccggtttttcgtgaagactgtgatggctaataaaatggcaacgaagaagtagaataaatcaaattgtgacacacctgctggtaaccagttaaaggcgcctttgggtgaggctaaacttaacaccgctagtccggcgatggttgcatcaggtgagacaataattcgtttacgcatgatgaaaacttctgataaggcaacgagtgctaaaacggctgccgcgatatcaatgtaaataccaccaaagaaaatgatggggataaagatgattaaagcaattgttgctgtaatgacacgttgtttcataattgtatttcctcctatttaagaccgccaaaacgacgattacgtttttggtaagcgccgattgagcgttcaaacactgctggggtaaagtctggccagaattcatctacgaaaacaagttcgctgtaagcaatttgccagagtaagaagttcgaaattcgctcttcgccactcgtccgaatcaataattctgggtcagcatattcccctaaaaagccagtcatcaagtaatcactaatcaacgcatcgtcgattgcatcgacctcaattgtaccatttaccgcatctttagcaatttgcttaaccgcttgttggatttcgtcacgcgacccataattgagtgcaaagttcaaaattatccctgtgttatcagccgtatcggccatcgcattgttagccgctttttgcgtcttttctggtaattcttgaatattacccatgactttcacacggacgttttcagcaatcaattccggcatgaacgtatcaaaaaaatcgaccggtaactgcatcaagaagttcacttcgtcatttggacgcttccagttttcagttgaaaaagcgtacaacgttaagactttaacacccattcgactggccgttttggtaatcgtcttaacgttttccattcctgctttatgcccagcgattcttggcattaagcgtttcttcgcccaccgaccgttaccatccatgatgatggcaacgtggttggggatattggtgggatctagttgttgtgcgtctgtttttttatttgtaaacaccacatactcctccagtttcaataactctcatatgattgtaccaaaaatcacaggaagtgactatttaaaatcaaccgattgtcaccggcattgtacaaactgaaccgcccattctgcactttttgagttcttcccagatgatttttatccacgattaagcctttaataccaacgattcccgccacaacgtactgttgccgctatcacattgaaatttattgttaaatattagtagattcctatagctattggcatgtaacaggttaaatatgataaactaatacataccttaaacagaaaaagggagtttattatgcgaaaaaccttcgaactctttcgacttgattggcgtcgaatcttaaaaagcccgatcgctcttctattaattattgccctcattatcattccatcgctctacgcgtggtttaatatctgggcgttatgggacccttatagtaaaacgcaagacttaaaagtcgctgtttactcagccgatcaaagtgttgtcattgctgacaaaaaagtcgagattggcgccgaactaattagccaattaaagaaaaacgacaaattaggctggcaatttacttcgagcaaaaaagaattagatgacggcgtaaaaacggggaaatactacgccgggatttacgtgcccaaaaacttctcaaaggatctcgttagtttcgtcgatggcaagattcaaaagccaaagatagtctactcatctaatgataagattaacgcgattgcgcctaaaattaccagtgcgggtgcaactacgcttcagtccaccatttcagaagaattcgtctcaaccgttggtaaaacattgatgagtaccctaaacaaggccgggattgatctcaatacaaatctccccgtcattaatcgtttctcgagcctcattctcaaaacagaccaacaaattccagaaattaaccaatacgcagaacaagtgcttaatctacaaaagaaactaccggaaatggcattaaagcttgcccaagccaacgagttcgcggcctttttaccacaagcaaatgccatggcgcaaaaagtagtcggcatcaatcaatacttaccacaagttgaagcagccggtcagctcgcaacgaaagttcaggctaagattccagaaatccaaagtgctggcaaacaagttgccacactcgattctgatttcgatggcatcgccaatactttaacgaacggcattaacgaagctcaaactggtttagatgtgttaaacaaaacacaaaaagtcttaccggacttaatgacttttagccaaacggcccaaggtgtcgcgggtcaattacaatcagacttaatccctaaactccaagctgctttaccggtcattcaaaaaacggtggatcaagggttagccattaccaatcaattggcaactaacatttcaactaatttaacggccgtcaatagtttgctgagtcaactcaaagaggatcccaataatgctgaactcaagcaagcgctcaaagaagcgctccagaacttatatgatcacaccgctaccttgcaaacccatgcgactcaacttgcgacaaccctccaaaacttgcaagacagctacaatcagtcagcagtggcgaatggtcaaccggaatcacatgcacttgatacaccgattaaacatttaaatacgttggcgacccaactcggcgtttttaaaggccaagttgatgaccttctcgcccattacgatgatttatcaattgacgatttgcaaaccaagattaatggtttgattcaatacgccgaccaagtcgaagacagcgtcgctaagattcaagcggcccatatcggtgacagcgtcaaaaatatgctcgaccgcttttcaacattaattgctagcggtaacgccgtcttaacacagcttaacggcgaagttttaccgaaactccccgcactcttattcaacacacaaaagacgctccaacaagccatcgactatctgcaaaaatacgctcagcagttaccagcgttgaaacaagaaattcatgacgcgaatacattattaaatggcaatatgggcacgattatctctggattaaacaccgcttctgacgtttaccagaatgattacccactactcaaaaataaactgcaactggcaaccagtttcatcaacaatgacttaccaggcatcgaaaacgacttaacaacgacgctcaacatggccaacgagaaattcccactcgttaaaaccgccttaaatgatgcgaccgacctcatcaacaatgattggccattcttacgtagcgggatccaaaaaggcgctgaggcgattcgcaaacaacaaaagacggtcgatctcaaagatctgattaaattgcttcgccgcgatgcaactaaggaaagtaatttcttagccaaaccggttgaactgaaagaaaaacacgtctacccgattaagacctatggctcagcaagtgcgccgttctacacagccctttgtctctgggttggtgcacttcttttgagtaacatcgtcttaaccaacttcgcgttagacgacaaacaaaagaaacagtacactaagaaacagcaatttattgctcgctggctaacctacatcgtcattggtgtcgcccaagccgtgattgtgacgcttggtaatattttcttattgaaggcctacatcgttgataaactaccgctaatcttattagccgtcttcctgagcatggtcttcatgacaattgtttacgttctcgccgcgatgttcgggaacgttggtaaaggaattgcgatgattgtcttggtgctttccatctctggcggtggcgggaacttcccagttgtcctctccgatcaattcttccagtttattaaccccattttaccgttcacatacggggtcaacctcttacgcgaaccaactggtgggatttacgcaccgaacctctggcataactttatcatcctagcgctctttgcggttgttttcttcctaattggcctcttcctgaaagatcgaatcaatccattctttgaaaaactccacaaagaagcgacgaagagtaaaattattcattaacgcaaaaaaagccccgccactgttgtggcggggctttttgcatccattagggattaaccttctgtgatttctttttctttgttcttggcgatttcgtcaatcttcttcgttgcttcattcgtcaatttttgaacttgttcttctaaatcatgcatttcatcttcactaatctcgcttgctttttcagcttttttcaagctgtccattgcatcacgacgtgcatttctgatggcaactttgccgatttcagcttctttaccaacttctttagcaatttccttccgacgttcaccagttaattgtggaattactaaacggattactgagccatcgttggctggtgaaatccctaaatcagctgtataaagagctttttcgatatcttcaagcgcacccttgtcataaggggtaatcaacaagacccgtgcttctgggactgtaattgcggcgatttggttaagtggtgtcattgcaccgtaatactcaacattcacgcggttgaccaagcttgcattcgcgcgaccagcacgaatttggcctaatgttctttgtaatgaagcttctgctttttccatgcttgcttttgcttcatctaaaattggatttgccatattattctcctccttcgatcgttgtcccgatgttggcaccttcaacaacttttttgatattgtttggttcgtttaagttgaagactaccaatgggatatcattgtccattgataaagtacttgcagttgaatccatcacttgcaagcctttgttgataatatctaaatgtgttaatgtgtcgaatttaacggcacttgaatcagtgttagggtcagcagagtaaacaccatcaacgttgttcttagccatcaagatcacatctgcatcaatttcagcagctcgtaatgcagccgttgtatctgttgagaagtaagggttccctgtcccaccagcaaaaatcacaacgcggcctttttctaaatgacgaacagccttccgacggatataaggttctgcgatttgacgcatttcaattgatgtttgcacacgcgttgggacaccaatgctctctaagttatcttgtaaagctaaagcattcatgaccgttgccatcatgcccatataatcggcttgcgcacgttccatgcccatttgttcaccagtcacaccacgccagatgttcccaccgccacagacaatggcaatttgaacccctaaatcgtgaactgatttgatttcgtttgcgactactttaacaatttcagggttaattccgaaaccttggtcgccagcaagtgcttcaccactcacttttaagacgatgcgtttgtattttgtatttgacatgattgatatccctccgttgattactaggctcattttaccatatttaataagttatttgggtatgcgattctgaattatcgtaaaactgcaaaaaaaaggagcgcaaattgcgttccctttttgaagcaaaataagcttatttgatttggcccatgacttcatcaacaaagttattttcttttttctcgatcccttcaccaactgtgaaacgaacgaaacctttaacgctaccgttcttagatgcaacaaattgtgcaacagtttgatctgagtctttgatgaaagcttggtcgtttaagctgatttctgacaagaacttgttaacacggccttcaacgatcttaggaatgatgttttctggtttgccttcgttctttgtttcttcagttaatacttcacgttcgtgatccaatgtttcagcaggaacatcttcacgagaaacgtattgagggttaacagctgaaacgtgcattgcaacgtcatgagctgcttcatcgtcagcaccttctaaagtaactaatgaagcgatttggccaccattgtgtaggtatgcgccaaagtgatcgccatcatttttttcaactaattcgaaacgacggaagctgatcttttcgccgataacagcagttaagttgattactgagctagcaattgtgccttcgcccattggtaatgcttctgcagctgccatgtcagctggtttgtttttagcgattgtttcagcaatatctttcaataaagctttgaattgatcgtttgaagcaacgaagtcagtttctgagttcacttcaacgattgcagcagtgttaccatcgatggcgatgcctgctaaaccttcagcagcaatgcggtcgctcttcttagcagcctttgccatccctttttcacgtaaagcatcgattgcttgagcaacgtcgccgttactttctacaagggcttttttagcatccatgatcccaacgccagttttcttacgtaattccattacttgagcagctttaatttcagccataattcatacctccgacaatttatattcaatataattggtttaaaaaaagctgtcccacaagtcaggcagtatttgcgaaacctctaagacagcttatttgaatctactatttagcgtcagtgttagtatcgttgtcgccttcaactgcttcaacgatttcttccattgagtctgctgatttgttttctgcagtaaatgtagcttcttcaacatcatcttcaccttgacggccttcgatgatagcatcagccattttagctgtgattaaacgaacagcgcggatagcgtcatcgtttgatgggataataacatcaatatcatcaggatctgagttagtatcaaccatagcaacgactgggatatttaatttttgtgcttccttgatagcaatgcgttctttacgaggatcaacaacgaacattacgtctgggatgcgaggcatatcttcgataccgcctaagaatttttcgagtttttcttgttgtttcttcaacaaggcaacttctttcttaggtaaacgatcgaatgtaccatcttcgtccattgctttgatttctttaagacgtttgatccgtttttggattgtgtcccagttagtcaaagtcccacctaaccaacggtggtttacaaagtattggcctgcacgtactgattcttcagcaattgcatcttgtgcttgtttcttagtaccaacgaataagaatacaccttcattagcagcttcttctttaacgaagtcataagcatcgtcaaccatgcgaactgtcttttgcaagtcgatgatgtagataccatttctttcagtaaagataaatttcttcatttttgggttccaacgacgtgtttggtgaccgaagtgaacacccgcttctaataattgtttcattgacaatacagccatgtcaacagacctccatatggtttttttcgaccactggtttcacttttttagagaacttgtcgccaagcacctctctagaaatcaaccagtgtgaattattttttggtattgaaataccgtttaaaagtatactaaaaataacaaggcgcgtcaacaagaacttacatgccgcccaattgtttctgataacgggttgcatcttgtggttggtggctcactgaggtaacgccactcactgtttcaaccgctcgatagcccgcttttagcgcgacttgctgactcgccacgttttcgtgtgcagcaatgatactcaactggtcaagttccaattcactggccgcgtattgttcaatggcggctagtgcgcgatgcatgacacctcgtccgcggaaagcttcatctaaccaatagccaacttcacccgcacgatccaagtcgtcaatattgtggacatcaatcgtaccaactaactggtggtcatcccaaatcgttgccatccaaagttcctggtttgccatttgttgttgcgcatattttaaaaagccaagttcatcggccactgattcgatatcgcccacccatggtaaccaagtatcgagattgacgcgattttgatccactaactgaaataacgccggcgcatccgcttccgtcacaggttgtaaatgaatgtgttgatcgacaactaacttaggttgcatattggtctctccattctaaaattgagttcttgaaatgccatgttccattaaatattgttcttttttgcggcggggttgatgtttgaacgcatactctgctttaagcgccgccgatttatcactaaacgtttcaaaatataataaccgcactggtcggcgcaattttgtgtacttcgcacctttgccagcattgtgcgtggcaacgcgtttggtaacgtcggtcgtgaaccccccataaaaactatgatcggcgcagactaatacgtaaaaataataagccttctcagtcattgtcagccatgaataacttcgtgcgcatctctggtgtatagtggctgtcttggtcataaatcgtcagttccggaagcattcgtaagcccccttttttaccatctttgaccgcttcaattaacaccatattcgcttctttgcctgctttgggataaacaaaccggacgcgtttgggttccatgcgtgcggcgcgtagttcgtcacagatttctaagaaccgttcgggacggtggactaaataccctttaccattcatctttaacaggccactcatggtttgaaccacagtgcgtaagtccgttgcaatctcatgccgcgccagtgccagatgttgattgggatttttttgactattgggttcaaccttaaaatatggtggattacaggtcacaatatcgacgctgtccttatgaatcttagtgttaacgtctttcaaatccatattgagcattgtcacctggtcggttaagtcatttaattcaattgaccgttgtgccatgtcggccaaccgttcttgaagttcaacaccgataatttgaccatttgttttgggactcatgaataatccaaccgccccattgcctgcgcacaaatcgacaatcgttccgcgttttggtaactgggcaaagtcggctaacaacaccgcatccatcgaataggaaaagacggatgggctttgaataatctgaatatctaagcgaaataattggtcaattcgctcatctgcttttaacatcgttctaccttcaacctcatttgtatttaggcatattataacaaagagtatcattatttggtataatgagcagatactagtcacgtttgaaaggaatctaaactatgtttttctcatttgcacgttttatcgtccgcattttagcctggttattgaatggcaatttgaaggtcgaaaataaagaagccctgcccgaagggacttatgttttagttggcccgcaccggacttggtgggatccaatcttcttcgcacttgctgctagtccccgaaagttcacgttcatggctaaagaagaactctttaaaaacccaattttacgcttcatcttaacccacgcaaacgcatttcctgtgaaccgaacaaatcctggtccatcggcgattaaaacgccagtaaaagcccttcgctcaaaagaactttcgttaatcatgttccccactggtagccgctattcaagcgaacttaaaggcggcgcggtcgtaattgccaagatggcgcgggtcccactcgtaccagcagtctaccaagggccattaaaattctctgatgttttaaaacggaaaaagattacgattcgttttggtgaaccaatcccaatcgatccgaaattaaaactcaacgaagagaacttagaagttgtcaatcatcaaatgcaagccgcatttgatcaaattgaccacgaaattaaccctgattttaaatatgaactacctgataaaaaataataacaaaaaactgctagatgatatcatctagcagtttttttagcgcgttaaattcttaaccgcattcgtcaccaatagataggccgtaactaatgccactgcaatccagccaaattgtgttggaatcgcttggaaatcaacggcttgtctgagcggtgtcaataccagaatacctccaattaacaaactgattaaactccccaagtaaacacgccaatttgcgcgatccttgaacggtgatgctggtgtccgtaatacataaaccactagcatctgcgtcaataaaccaacgacgaaccaactcgcttggaaagccccctgttgagctgatgtttgcaggccaaatcaaaaccagagaatcgcaaacgttaagatatcaaccattgagctcaacggtcctagaataaacgcactcttcagtaagcctttagttgcccactgtgttggttggcgcaattgatcttcagcaacccgatcccaaggtaaccagagttgtgcgacatcatacagtaaattctggacaagaatttgcagtgacaacattggtaaaaatggtaaacagatgctggcaaccagcacgctcaaaacatttcctagattagaagctaacgtaatccgaatgtacttatacatattgataaagactctccgtccttcaagcaccccgtgttctaaaacgttcaaatctttttccactaggattacatcgctagcatcctttgtgaggtctgcggcattatcaactgaaatcccgacatctgcttgtttcaaagctgtcgtatcattaatgccatcgcccatgaaaccgacgacttccccttgtgcttgtaataaacggattaaacgcgctttttgaagtggagccaatttggcaaataatgcttgctcggttaatagctcactgacttgtgcatccgttaacgtctctaacatctcaccagtggtcacagctagattctgaatgcccactttttgggcaacttgctgcgtcgttaaagcactgtcacccgttaaaattttgaccgccacttgatgagcttgtagttgttgaattgccgagatagctgattgttttggtgggcccaaaaagccggcgaaaatcaaaccttgattaccaacgcggtcaattgatgccgtctctgctaactcatcttgataagcaaccgccagcatccgcatcccttgttgtgccaaacgatcatgcactgccactaggttctgcttttgcacttcagtcaacggctcaatctgatccgctaacctgacttgggaacacgttgctagcacttcttcaaaggccccttttggcactaattgattacctgcatggtttttgatccagaccgttagccgccgccgctcgaaattaaatggaatctcgcccaatttttaatatggaaagtcatcattggtttggtcttgttcatagtaatgaataatcgcctcatccagaaggttctgccagccggattgacccttggcgttcaaatatgctaatcgcaaaacttgcacatcccgctctcctaaaatatctgcatagtacatcaatttaatatgatcttccgtcaacgtccccgttttatccgtacataaaaccgacatcgccccgagattctgaatggcctttaactgctttacgatgacctgttgttgacttaaaacgacactgcctttcgccagattactattgacgatcatcggtaacatctccggtgtcaaaccaactgccactgcaatcgcaaagaaaaacgactgttgccaatctcccttagtcacaccattaatcacaaatacaaagggcaccaaaacgagcatcatgcgaattaataaccaactgatgtgttttaaccctgcatcaaattgattcggtcgcgacttaggttcagtagtcacaattgcgctaaagcaagtcgcttgacccgtggcaatcactaacgcggtagcttgcccattgacaacggtgctgcccatcagcaataaactcgccatatccgccgcattcgttacgtcagttgcttacgctgttatgcgtttgctcacgggttttgattcacccgtcaaagaagattgattaatttgtaaatcatggctcgccagaatttttaaatcagcattcaccaaatcccccgtctgcagctgcacaatatccccaggtaccagactttgtgcggcaacttcagttggttgaccctcaattacaacccggctggtctttgccaacatcgcttgtaaagcaatgctcgcttgctcggacttgcgctcttgcacgaatcgaatgctactagacacaacaatcatgattaacataactatcgcgccatcaatatctcgactgagccaggagatgatcattaagacggctaatacgccgataaacggatcttgcacgctctgccaactagctcgcaataacgaacgctgttgccgcttttgaatcgtattttccccataggtttgtaaccgtgctgttcgttgctgccgtgataaccccttcttgtcagtttcgaaatgttctaaactcgcttttggcgttaattgattaatctgattgagtgtcattttaattgtcttagccatcgtaatccctctcattcgcagctgatccgcataaaaaaggcatcctcaaagaaaggatgcctcacaagaaaaacaagccattccaatcgttgagctttagcactatatgacgtagaactttgttcagctacattagaaaaagccttcagggcagtttctgttgactcaattggcatctctcgatgtttctgagtagcagcgtttgttcatataggagcctcacctaacggattagcgatatcaatatatttatatatctatcataccaaatcgacttcaaaatacaattaaacagacttattgaagatattcatttaaaaattgcgcaactttattacgataggttgttggatctgtagccaaggcttcaccatgagctgcccccgaaaccacccagagttgtttaggtgcatgcgccgctttgtaatttgtatacaccattttggttggtacaaatttatcttgatcgccatggatcatgaagattggcaatttcgagttagctaaactcttagcagtatcgccatcattaaagttatagccggcgcgaacccgtgccatccaattcgttgtgtaaaataacgggaatttcggcaatccaaagagatcgtttagttggtatgcgagttcgtcagcgatgctattatacccacaatcttcaatcaccgctttcacctgcttaggtaattcttcacccgcggtaaacatgacggtcgcgccacccatgctgaccccgaaaagggcaatttgactatcctgtccgttggtagcgacaatttgttgggcccacttgacgtaatccaagcgatccgtccaaccatagccaatggcatcgccttccgattcacctgctgcacggtcatccggcgcgagaacgttgtagccaagatcgtgatacatgtgaatatagcgtgccatatcctcttttttacccatatagccgtgcgcaactaaaattgttttgttcgtaggttttgttgctggcacataaattgccgccaattttaaatcatctgtggcagattgttgatgccactttgattgtttaacattttttaaccaacgttgattgtcttgatagactttcgttggcttaccaccatttaaaaatgatttttgccccggtacaaatgcgtattgatacatatacatagtggcaccaaatagtgctaccaccactaagacaacaacgctaattaacgaccatttcagccagcgtcttttcttcatgtgctaaattcctcccgatttactccgcaataataatagtcgtgtttttttgaaactgcttattcttcactgccaccattttggagttgatacatttcataataacgtcctttttgagccactaagctatcatgattaccccgttcgacaatctgcccttgatctaaaaccaagattaattcagcatcgcgaatcgtcgatagacggtgcgcgatggcaatacttgtacgtccttgacgtaaccgagcgagaccagtttgaatcatcgattccgtttccgtatcgatattagccgtcgcttcgtccaagaccaagattttaggatttgtaaccaatgttcgcgcaaacgaaattaattggcgttgtccacttgaaaattgggcgccaccttcaattacacgagcatgatattgaccaggtaattgttcgataaagtcatcagcttgcacgaattcagccgctgcgcgaatttgggcatctgtaatctcttgattaaataatcgaatatttgatgcgacatcaccataaaacatgaatgcatcttgtagaacaagccccatcttgcggcgcagttctgctgtctgaaaactccgaatatcatgtccgtcgattagaatctgaccttcataaaattcatagaaccgcatcatgacattaataattgaacttttcccagaaccggtatgcccaactaaggcgacagtttgtccaggttcaacaacaaatgagatgtcatgcaaaatttcatttttcccatcgtatgaaaacgaaacatgcttgaattcgacgcgaccctcagtaatttcatttgcagcatcggcattttgagctggcgcatattcttcttgatcgagaattctgaaaattcggcgaccagcgaccattccatcttgtaatgatgataaagaatccatcatattggtcatcggattaaagaagttcccaacataggttgtgaacgcataaaccaaacccgccgtgacaaagctatgcagggctgagacaccaaacaagctcaagacaacgaccaatgccagtgtatagagtaaattcacaattggtgcgagcaacaacgagttcgttcgaatcatcgcttcgcgcgtttttaaatagtccgcgttaacttgttcgaattcgtcggtcaaccgtttttcctggcggaattgttggataatcgtaatcccttcgattgattcgttgagtttcgtattcaactgactcaatttttcacgcatatgccggtaaacccgcgcactgtaactactgtaataccagataacaattaacaatattggtagaaacgctgccgttgcaagggcaatttttggtgaaattaaccacatcgcaatgaacgctgaaatgattgaaaatgaaccgactaacaaggataagaaaacattccaataatcaatcaaagtcatcgtatcattcgtgacccgcgatacaatcgagcctgctggcgtctgatcgaaataacgcatcccgagttgatggagcttctgaaataaatcgcgccggacatcttccatcgcgcgttccgaacccattccaaaaaggaaagattggaaaaattgtgtaatggctttgagaatcacgcctaaaccgtacaacgccgcaacccccattaaaacttgggtggtcgcactctgattggttaagtaacgatccataaagacttgtagtaatcgtggtaataaaatattgatggtcgctaaacctgcggcggccacaattgcgccgataaattggcgtttatagcgtttcgtataaccaaagaggcgtttcatgatgtgcaattgctctttcaatggaactttcttggaccattctgattgatattgcttggccatcttatgcacctcctaaggcttgacttaattgttgcttcaaccacatctctgcgtaccagccatctgcggcaaggagtgctttgtgtgtcccacgttcggtgatttgaccgtcatccatgacaatgatttcatcggcgtgcatcacactactcaagcgattagcagtgataatggtggtttgatcagcccgcatcgttttcaaattcattaaaatcacttcttcagtctttgcatcaacggctgatagcgaatcatctaagatcagaatttctggatcagtcataatcgctcgcgcaatcgcaattcgttgtttttgcccaccagataacgacacaccgcgttcaccaacgaccgtttcataaccttggacaaacgttaaaatatcatcatgcaccgcactcgaaatcgcggcatcttcaaccgccgcttgatttcggtcaaaatcagcaaaccgaatattgtcgcggacatccgttgaaaataagaaattatcttgtggcacatagccgatactatcaagtaacgcatccagcgaataatcccggatatcgtgaccatcaatttgaatctcgccttgatactgatcatattcacgcaataataatttaatcagtgtggttttacccgaaccaacttttccgacaatgcccaacgttttaccttgtggcagagtgaacgccacctgtttgagcgttggttgtttttcgccagggtacgtaaatttttgaacagcataatgaatatcgccagttgctagtgtttgaatcgcatccggtgcttcgacaatggtgctggtttctttcaaaagttgatcaacccgatcataactcgcattgccccgttccaagacgttgaacaagcgcccaatcgcaaacattggccaaacaagcgccgcgatataactaatgaacgaaatcaattgaccaatcgaaatgctgtgattcataaccaacgtcccgccataaatgattgttacaatgtacgttaacccgataatcaaactgatggcgggatcaaataaaccatcaatcatattcacacgtttattaatcgcaattgtcttcgtgacaatctcgttgaaatctttaatatcagcttcttcttggccaaacgtttttaagactttaatcccagagacactctcttgggttttatcattcaaccgtgaaaaagccgcctgtgattgcccaaacgctgtgtgtaaatgtgcacctaaccgtcgtgacgcaacggccaacaagggcattggaatcaaggccatcaacgttaagcgccagtcaacgaaaatcaccatcgcaataatcgttgtcccaccagtgatgattgaatcggcaaaggttaaaataccggcaccagccacttgttgaatcgcggttaaatcattcgtggcatgtgccatcaagtcacctgtccgatgtttttggaagaaggtcgtgtccatcttcatgaaatgccagaacaatcgactccgcaatgtccgttccagtttagccgcgccaccccaaatccgggtccgccaaccatagcgaaaaatatattgtaaaatcgctgcgcttaacaagacgccgagccacatgattaatttttgggccgttaattgtttggcgtccattaaatcaaccagggtcccaatcacttttggtggcacaatttggacaatcgccacgaggactaaaaagatgacgccccataaatagcggcggtattcttgtttaaaataccaccctagttttttaaaaattcccatgttgtgctcctatcctctaaaattcgataagtcctattataacaatcttaattaagccggacaatcatttgtatttccgttcttattatgataaaaaaagagcttctaacaaacgacttgttcgttagaaacccttttaaaaccgacttgactgttttattttttgttgctacgtttttgttgtgctttcattgagctcatcatctgatttaatttcttttcagatggtttttgacccatttgcatcatcatagcctttaacatttcttcgttaattggtggattgtcttggaaatacttcttcatgtaagcacgtgcgccaaagaaaccagcgactgcgcctaataaagccccaatgacaaataataaaatgcctaatcccatatcttatgcaccccttcctaattcagttcacttaaatagtttacacataattaacctaaaaagaaagcggaattctaagattaatcgtcacgcaagcctttttcccgttggatatccttcactttttcaggagtgacttccttaccttctttgtcatacacttgtagcatctcaacttgtgagcggaaactttcgcggaaatcctttaaataggcatcgcgcagtgtttgacgttctgctgtttcagcttcagttagtccttcagcttttgctttgtgtgctaattcattaattcggtctaatcgtttttgatccattgccatcttgttgccctccaattcaaactatttgtctattttggactaaaatccgtaaaatgtcaaaaaacacgaacgcttgtttgaaatcccgctataggtatgctaacatatagctattagaacaaatgaggtgctcttatgacgagaacagaatccaagcaattagaggtcttgcgttttatccatgaccgcgttcaagataaaggttatccgccaacggttcgtgaaatttgcgaagccgttaatttatcctctacttctaccgttcatggccatttagcacgccttgagaaaaaaggctttttacaaaaagatccgactaaaccacgtgccattgaattaacagcagctggtttgacagcaattggtgcatcacagaagaagattccggttctcggtgttgttacagctggggtgcctattttagcggttgaagaagcgaccgattatttcccgattccaccaagtctacaaactgaacaagatttgttcatgttgacgattcgcggcgaaagtatgattagtgccggaattttagacggcgatgaagtgatcgttcgtaaacaagcgactgccgataacggtgacatcgtgattgcaatgactgctgaagatgaagcaacttgcaaacgattcttcaaggaacctgatcattatcggctacaaccagaaaacgatacatttgaacctattattttgaatgaagttagcatcttaggtaaggtcgttggcctataccgcgacagaatgtagctatcaaaaaaggattcgccgttatggcgaatcctttttagcatgttccttcagccaggtccttacgtttagcgactgactgacgttacattttttcttaacgtgctttctaatgcaatttcttccgtctagccacgtcccgcaaacaacccgattgcatcggttattcaccaacctaagttaatgctcagactctcccagcttagaaagacatccattaataatccattaatttgaagatatcgtagtctttaattttttcgcgaccgtttaaatcgtttagttcgattaaaaaggctgttccgacaacaatcccacctaattcttcaaccattttgatggttgcggcgattgtgccgcctgttgcgagtaaatcatctgtgaccaacactttttgaccgggtttgaccgcgtctttgtgcatgtataatgttgattcgccgtattccaagccgtaacttgctgagatggtttcgcgtggtaacttcccctttttacgggctggtgcaaaaccaacgcctaatttgtaagctactgggcagccgacgatgaatccgcgggcttcagggccaacgatcatttcgacccctttactctttgcgtattcgacgatcttgtcggttgctgctgcatatgcttcaccatcagacatcaaaggtgagatgtcacggaatgtgacaccttcttcagggaagttgggcacacttgcaacgtaatctttaaagttgattgccattttaaattcgctccttaactctttcaacagtttgctactgattgaatcctgccagccagtctttcatctccgcgaaggttgagtaaacaagctgcttttccatgtcaattttagctaatcgttgttgataactcggtgcactttctaatgcgtgcttttccggttgttccgcggccgaaatgagaccacattctattttaacaaatcctaagtcaaaaaacacctgcaacataaaaattaatagcggcaatttaatttttagataagtcgctaattcccctaaccgtgctttttcaattcctggatgttgacgtaggtaaaccaagaaagtcgcaaactgtttcttaccaggaataccatcaagatatgccgaatacttactatagaagataaagctgattttagtggcctgttgttggcgataaaaggcttcaaattcatctaaatcagttggttcatcaaccacaatcaattctgcttgctgtgcgacatcggctgctaagatggcttggctgccggctgggatataactttgtagctgtgccagatgcttctcattgaaaaagacataggtgccactagctttaaacaactgttgcgtcaaccgattactccgttgatcgattaacacttgcccactcgtttgtaaatctttcagcatcaattgcaacgtcgtattgccgcgccaagtattctcacttagttgaccaactaatttcaactgttccaccgcttgtaaatcgtcgtacaacgcaccacggttaaatgctaagactgctaactgcgcttcttgatcaaccgccgtaaatttcaaatgcttctgatccgcaccgatctgcttcacattggtgacggatggcaccgtcatttcaatcaaaggttctgggttatccgtgccataaggagctaattgactgatggcttgataaacatcgggcgtcacatcagctaatgcgagttgtaaatcaaccgccaatgtgggtttcgttgttaaatcaatctgattatcagcggcataagtattcatcgccgtttgtaaagcagccaattgatcgactggcatcgttaagccaacagccatatgatgcccaccaaagtgcgtcaacaatgtgcgttgggcatcaagcgctttaaagagatgatatgcttcaacacttcgtcccgatcccttggcttggccagttgctagatcaattgctagcactaaagttggcttaccggtttgttcaacgatatgactcgccacaatccccagcacaccttcatgccagccttcatgtgccaacactaaggtcgcactagcttggttctcaggtgtttgtgccatttcgctagctagcgcagtaatttcttgcacaagaccctggcgctttttattttgttgttccacaaattgggcctgttccaccgcttgttcttcatcgaaagtcgttaatagattaacacctaagttggcatcacctaagcgaccaatcgcattcaaacgtggcccaatcccaaatccaatcgatgtggcgtcaagcgtttcttgttcaatacccgctgactggcaaagagccactaaaccgggacgactggtattttgtaattgttgtaagcctaagctaactaaaacgcgattttcatcagtcagtgacactaaatcacagaccgtcccaatcgccactaggtccaaactctcgtaagggatttcttccaataatgccgtagcgactttaaatgccaccccaaccccacataaatcactaaagggatactgtccctctggatgacgggggtgaatgattgctgtcgcatttggcaatgtacttggtagttcatggtgatctgtgaccactacatcgacaccgtgttcttgcgcgtaggcgattggctctaagccactcaccccgttatcaacggtcacaatcaactgggtcccattttcaacgagttgcttatagacatctaaattgggcccgtagccatctttaaaccggttgggcacatatacttccacatcggcgcctaaactttcgagcgtctcttgcatcaaagcggtacttgtaatcccatcggcatcgtaatcgccgtagactgtaattttttcgccgcccatcacagccgcttggattcgatcgactgccgtttgcatatcatacaaagcgtatggatcatgtaattgaccgacattcggatgcataaacgcactgattgcctcaggtgttttgattcctcgttgccacaacaattgggctgcggctttcgggagtgcttcaactgccattattgcttgtaagtcttggtcagttggtgttgcttttaattgccattcatattgtgcttccacattaatccctcgctacttccaaatcattaacttacccattatagcaaagattattatatttcgtttaataatccaatcaatgcttttgtttatcagtccaaatgatatactgttaattgatacacaaggttattacatagggggaaacaaccatgacagttttagtattaggtggcgccggctacatcggctcgcacaccgttgatcaattaattcaacgcggcacggatgtcgccgttgtcgacagtctcgtcaccggccatcaagccgccattaatccacaagcgcgcttttattaaaaactaaaaaaatcacttaacgatgcacgaatgcatagaaaagtggtgtgagtagtctaaagaaaggcactttcctacgcaagtctgaacttacaggttcaaagggatcaggctgtacaaacctatctcagttcttctaagaacacccctagtgcaaagcgattaatttgtaccctcagtatagagagtgtggtaggtgaatgcaaccgttttatttggtgaatcagatatcatttgttaacttttaggtatagaccaatatttttgtgtgcatgaaaccgcttcaaccgctatttataaaggtctataccgattgttaagcgcttgcttatcgtttacattaatgatttaaccatattaacgaaaaaaatgaatggagaaaaacttatgaagaattacttacaacgaatgggtcgttcattaatgttgccagttgctgttttaccagcagccgcaattttaatggggattgcgaactgggttggcaatggcgattcaaacgcaaacgtctttacaattttcttatcagccggtggcggtgcaattttaaataacttgccattattattcgccgttggtttagcactcgggatgtctaaggatcaagatggtgcagctgcacttgctggtttagtcgctttcttagtgcctaagacaatcttggcacctgcttcaattcaagcgatgcaaggtttatcagacatcgctaaagtaaacccagcttttggtaagattgaagggaatgttttaatcgggattattgccggcttaattgcggctgcaatgtataatcgcttccacaacgtgaagttgccaatggccctctcattctttagtgggaaacgtttagtgccaattatggcggcaactgcaatgatggttgtttcagctatcttgtactttgtttggccagccgtctttacagtattagtgtcatttggtgaagcaatttctaaattgggttggtttggtgccggtctatacggctttttcaaccgtttattaattccaaccggattacaccatgccttgaactctgtgttctggtttgatgttgctaacattaatgatatcgggaatttcttgggtggtgcgaaatcacttgcgaatggttcagctgtgattggtaagacagggatgtatcaagctggtttcttcccagtcatgatgttcggcttacctgctggggcttacgcaatctacaaaaatgctcgtccagaacgccgtaaagcaacagcttcattgatgttagctgctggttttgcgtcattctttacaggggtgacagaaccacttgaattctcattcatgtttgttgcatggccactttatgtattgcatgcagctttcacagggatttcattggctgttgctgctttcttccactggacagccggtttcgcatttagtgctggattagtcgattatgttttaagtttgaaaaacccagttgctaaccaaccgttgatgttattggttgaagggttggtcatggcagttatttactactttgggttcaactttgccatcaagaagtttaacttgatgacaccaggtcgtgaagcagaagatgctgttgatgaagatactgctggcgttgaaacagacgctactgatgataaattcatggttcaagcaaaacggatctacgctgcaatcggtggcaaagacaatatcaaagtgattgacaactgtacaacacgtcttcgattacaattagaagacactgccaatgttaaccaatcagcgattaaagctgctggtactgctgggattaacgttttagataaaacaaacattcaaattattattgggacagaagtccaatttgttgctgatgctttaaaagaactttataaccacaatacgccaatcgcaacaagtacaccagaacaagctgccgcaccagttgaagcacctgttgatagcgatattaactcaggtgaaacagatgttttctatgcagttgctaatggtgaattgatcgatattgaaaatgttgatgatccaacttttgctcaaaaaatgctcggtgatggctacgctgtcattccaacagacggcaaaattgttgcaccagttgatgggactgttatgactgtgttcccaacgaaacatgcaatcgggattaaaacaacgaacggtttagaagtcttagtgcacatgggaattgatacggttgaattaaacggcgcaccttttgcagtcgctgttgaagaaggccaaacaatcaaacatggcgacttattagcaacggttgatttgaatcaaattactgctgctggtaagaagacggcaatgatggtgatcattaccaacatgcccgctgttgattacattaagtttaacgcaatgagtaccacagttgctgcagacgcagttgccttaaaagcaacaacgaaataatgaataaataaaaagccccgtaaacttcagtttgcggggcttttttgtgttatttagttaaataatcctttgaagaaattagccatgctatcaaagagtttttgaatgaagttccgattgctttgggtgttgagcttattgaagatgtttttcgcaccactttggatattattcattaacttaccggcttgattcttgaaatcatccgaatttaaagcaccggaatcttggattttaacgagaacattaatgatttgttgtttttgattattgttgatgatgttggtgaggttgttttgttcgagttgattattgacgatggtagtaatttggttaacagtcagattattgcccttacttgccatgtcttttttggcacctgtgacggcattattcaattgggaatctgaataaccatcggtgcctttattagcctgtgtgatatcgctgagggtgctcatttcgtcttgagcagcagttacttgcgcttggttgagtgaatcgccattttcagcgaaagcggcgtaaacgccagctaaggcgccagagccatcgattggaatggcggaagtcacgtaaattgtcgcattcgtgacgccggcggttaaggccgcatttttatattggttggctgtaattgtggtgatgttgttatggccattaaaatcgataattttaacattgatgccggtattgctgtcatttttttgaattaaagcacttgagtagacacttgagttggcgttaaatgtttgttgattttgatcaagatattttacaagtgtggaaccggtcactgttagttcactgacatctgtgacgttcgcggcattttccagtgtcttaagggtatcagctttttgggtgctagaaaggctggtcccaagagtggcaacgggtttgtcccacgatgtggtgctgtcggcaaaggccggttgtgcgctcagaccgataatagcagtaaatgcaatggggatgaggaacttcaatttattaaacataagcaataatcctttctcaaagcgaatgatacctttagtatagccaattcaagctgtaaagtatccgactttaactatttttaggaattaaagatgattttaaggcttttttaaggttgctgagtggggtgaatgctactaatgacccgtgtatgggttagtttctcgtagaataattgtggtcgtttagtcacccaacttaataagaagttaccggtgaataacagtggtggtaagagtgagagaccgataataaagagatagacgttaaaatgttgttggccactagcaacagcggcatccagggtgacgcgccagagttgaaaactgggaatgacgatgaaaaataggagtagctggtgccagaagatcgcccaacgaggatgatggtcagcgacaatctgtagttgcaggagagattgaccaggtgttttgccacgccaaaaaacggggagcattaagaagtaagcaccagttgccaggcagtactgaagcatttctgaatgaatggtgggtagttttagtaatcgccagataacagcaattgcaaatgtaatgatgcctaacacacagtaatcaacggcaagtgccaataagcgccggaagtagcccactttttgaccgcgcgcataggctgcttgatccaaactttcacgagtgggtaagaaaaaggtgaccaagggctggagataaaatccaagcagcccgccagagatgttgagcaataagtcatcaacatcaaataaccgataagggcgaggataaataccatacagtccggaaagttgcgtgagttcaaagaataggaataacgtaaaactaagtaataaggtctgtttgaaagacgttttaaagaagtaacgtaaataaatgccaaatggaacggttaaaaagatgttaaacaacggctgaatggttgccgcttgtttaagtgttgcgaggtatgaactcggttcggtccaaacgaaatgggttgagttgataaactcccggacaaacgtaaagggaactaagttatagcgcggggtggttaaatgagcgaccaccgagcgtggggggaggggaagaataattaagcagtaagcggctaccaaatagaacatgaagctgtagagaattacactacgcaggatggttagcgaaccataacgatgatagtggtaaactaacagtggaacggttaagatgattgcgacgaatggaaaggcaattgccacagtaatgatattgctgacgtaaaccatgatgagctcctttggtgttagatgtggttatattgtatttttttaatgaacgcctgtcaaaacagggatcattgttcgttatttacgttcgtattttatcggttatatgtatcgttaagattttactgaataaaggctgattagagattttaaagttcgtcttttatattgattttgagataatttgttgctacaatagtttttgtgagttttagggtttaaatagcggatctgaagacggattcgaatagaggagtatgtttatatgacatctgtagtagttgttggaacacagtggggcgatgaaggtaaaggcaagattaccgactttttaggtcaaaatgctgatgctatcgcgcgttatcaaggtggcgacaatgcaggtcataccattcagttgggtgacacaacttaccatttacaattaattccatctgggatttttaacagtgacaaactcagcgtgattggcaacggggtcgttgtaaatccgaagaccctcgtttctgaattgaaatatttaacggatcaagggatcaacgtgagtcaattaagagtatcagatcgggcacacgttatcttgccataccattctaaattggatggcttacaagaagcagccaagggtgatcaaaagattgggacgactaatcgtgggattggcccagcttatatggataaagccgctcggagtgggattcggattgccgatttattggacaaggaactctttgcaactaaattaaaacaaaacttagacgaaaaaaatgcgctctttactaaaatctacggtgctgaaccacttgaatatgagacaatgtttgcagaatattatcaatatggtcaagaaattaaacaatatgtttgtgatacttcagttgttttgaatgatgttttggatcaaaaggggaatgtcttatttgaaggcgcacaaggcatcctcttggatatcgaccaaggtacgtatccatttgtgacatcatcaaaccctgccggcggcgtttcaacaggttcaggagttggtgcttcacggattgacgaagtggttggggtggctaaggcttatacctcacgcgttggtgatggcccattcccaactcagttagatgatgaaactggcgacttcattcgtgaagccggtcatgaatatggtactgttactggtcgcccaagacgcgttggctggttcgactcagttgtgcttcggcattcaaaacgagtggcgggtgtgacccaattatcattaaactgtgtggatgtcctaactgggattaaaacattgaagatctgtgtcgcttacgaattagatggcgaacaaatcgatcgttatccagcaagtctccgcgaattagaacgttgcacaccgatttatgaagaattacctggttgggatgaagatatcacgggtgctaagacgctagaagacttgccagctaatgcgcggcactatgttgaacgaattcaagaattagttgatttaccattagcaacatttgctgttggtccagatcgtgaacaaacaaatgtcttatctgctatctggtaggtattgctgaaaaagagtacaaaaaaagagaatgcaaagttcgttttctaaacgtgtcgttaaacacgccaacaaactttcattctcatgggtttggcaccagtcagtattatacacacattaccactaaaaagatagtgggaaaattagttggtttagaggagtcgttatggaaagagtaagtcgtttcttcgggattgaagaacaacattcaacagtgcaacgggaaatcctagcaggattcaccacatttatttcaatggtttatattttattcgttaacccgagcgttttaggtgattcagggatggataaaggggctgtttttgcagccacagcattagcaagtgcgatcgggtgtttcttgatggggttatatgctaaatacccaattgcaaccgcaccagctttagggattaatgcctttttcagttattcagtggttatcgggatgggtgtgtcatggcagacggccttagcgggtgtatttgtggcttcattaatcttcatgttgattactgtctttaagctacgggaaatcattattgatgccattccgcggaatatgaaactagcgatttcagctgggatcgggatgtttgtggctttcatcggtttacacggtggtggcttgattgttgcgaacaaatcaaccgttgttggtttgggggacttctcgcaagggacgacttggttaactgttttcggcttaatcattaccgttattttaatggtccgtaaagtaccaggagcaatctttatcgggatgcttctaacctcaattgtgggagccatcagtggcctaattaagttgccaacacactttgttgcagctgcgccaagtttgaaacccactttcttagctggtttaaatcacattggcgatatcaacaccgttcaaatgtgggtcgttgtactcactttcttattagtgaccttctttgataccgccgggacattggtcggtttagctgaacaagccggcttcatgaaagataacaagatgccccgcgttgggaaagctttggtatcagattcaacggccatgttagctgggtcattactcggaacatcaccagttggggcctttgtcgaatcgtccgctgggattgctgttggtggtcgaactggtttaacggccgttgtgacgggtgtgttattcgtcttcagtttattcttctcaccattattgacggttgtcacgtcacaagtgacggcccccgcattagtgattgtcggtgttttaatggctcaatcattgaagaaaattgactgggaaaaattagaaattgcaattcctgccttcttaatcgttctaggcatgccactgacttacagtatttctgacgggattgcattgggctttatcgtctatccaatcacaatgattacagctggtcgtcgcaaagaaattcatccaattatgtatgttttattctttgttttcgtggtctttatgtacatcttaaacgtaaaataaacaacaaacgcacagccgaaagtttcggttgtgcgtttttatgtgttgctgttattaattgcgaatcacaaggatttagagccggtaaatataaaatagtgtgttacaatagtcgtaaatactagtgaagggcttaaactgttatgcaaaaaaagacaagaaaccgattaattaatggcttattagccattctgttagtggttggattagtgttggtcttcatcaatccaatccgcaaccaactggttaaaatgatggcgcatcgtcagatggacgtcacagctgctcaaattaagaaaaaccaacataaaaaagcgagctttgattttgataaggttgattcactcgatacaaaacagattgtgaatgccgctattaaaggcgatgtgattgtcttaggaaaagttgcaattccaagtgtcaagatggccttgccagtcatgaaaggcgtctcagaggacacaatggctcaaggtggaggcacaatgagacctgatcagcaaatgggtgcagttaacaattatgctttagcagggcattctttccaaaacatctttctgccacttgaaaatgtgcgcgtcagcgataaggtctacttaacggatatggaaaaagtctacacgtacaaagttgattacaaagcttcaatcagtccatacgacgtaaaagtcatcgatgatgtaccaggtcgtaaaatggtgacactgattacctgtgataaaacggtccgcagatggtgtattcaaggtgaactcgtgaagacccaaaaggcaacaaagaaaatgttagctgttttcgggaattaacccgggaaataaaagactgccagtgagttgaaatgctttaatagcagggatgcaacagatttgttgcttgtttttgtggggttaattcgttaaattaggtttatagcggaggtggcaaaatgtcagttgggaatgctttaaaggaagctaggatgaatgttggggtgacgcaggaacaagttgcacagaatttgtttgttacacgtcaaacggtttctagaggggagcaagataaaacattaccaaacgttcatgttttaaaaacacttagtgtgctttatggtattccaattgatttcatgtctggcattattcattattgggcttgtgctttatccagtcgctaagaagatatcaggaatggttgttagctttggtaaacaatatgttaaatataatcaaaaggctctatacgcataaacataaaaacgtcatctattggatgacgttttttatttgaaaatcattggaatgaggccacctactaagagtggttggagataaatttgaagaaactaacgcgcctaaattattcaatgaattatcagcggatgaacaagtggtactcgttaattgggtgctaacaaccttgaaaccaattaaaacttttagcagtcagcggtcatcatacgagattaaacatatttttgaacgtacaccacttggcttttatgtattaaatggtgcaatgaaaggcgcgatgttaatcgctggttatcagattaagaacgaaaaagaaataaattggacgtttaatatatccgaacgtagcatttcgcgggcctatcaacttggataagaatttccgatttagggaattttatgtaaaaaaaagagatgtgcgttgagcgtgctatatgaacgcttggccccctaatatatagggggttggttaataacctgataaaacctaggttctaagtaaaggagtggttagcaccaatgattaattttactcccaaattgcaagaacagattagccacacgataaatcctattaaatcagtattttcattaatattcatattttatggacttaacttaaccggcggaagcagcggagaaaagctctttgggtgtttgatagccagtttgccggcgcggtaaattgtttagctttgactcaactgcttggatatcatgaggacccaaaatatccatggatagacccttgggtacatcgcggcggatcattcaactacggtaaaaatcgctgcgttgaaatagtgttcttttgcttgccctagagtatactctagggactattataaacaaaaagaagccataaacaaggatcatgctacttaacggcatagcatacatgactgattaaattaaccctcattagggaataggagcataacatcatgacaaaaaacgtattagttaccggcggcaacggttatctgggtctgcacattatcttacaacttttaaatcaaggttatcacgtccgtgccaccttacgccaactcgacaaacaaaccaccgtccgcaccgccctaaaagaaaatcaggcgcaacaccgcgaaaatttaagttttgtcgccgctgatctcactcaagatgctggctgggcgacagccatgcagaacatcgactacgtgctaagtgtagcatcacccgttttttccaatgacccgaacagcgacacaactgccaccgagggtattttacgcattttaaaggccgcccaacaggcccacgtcaagcgtgttgtcatgaccgccaactttggcgccatcggcttcagtaatcacgaccaaacgagcatcaccactgaagccgattggactgatcctaacgaaaaaggcttatcggcctatgaaaaattcaaactgatcgccgaacaggctgcctggcagtttattgaacaaagtcacggcagtttagaactgactacgatcaatccggtggcgatcatgggcccagcattagacgcccacgtttctggcagcttcgatctattgaaaaatttacttaacggtcgtcccaaaatgattcccaatatcccactcaatctgatcgatgtgcgcgatgttgctgacttacacattcgtgcgctgaccgcacctcacgctggcgggcaacgttttctggatagtgctgctggtcagatatcactaccagagatagcagcactgattcgccaaaaacgaccgcaaattgcccaaaacattcccactaaaacgatgccgaacttgcttttaagcagcgctgctttgttcaaccagaccgcccgcgaaggcaatttattagtgcacgtcaatcgtcagttgagtacccaaaaagcgcaagatatcctaaaatggcagccacattttgataatacgaccatcgtattagatagcattgacacgttaattcaatatggactactgccttaaattataaatttatttttatcacccccttgacaaacacttaaaatcgcgttaaattatagaaacattataaatcaatgagaaaattaaacgctgtgataagaaaagtataattgtattcaccagttaagcgagcgtcgtttggtgcaaggacgtcaaggtgcgacaattagaaaatcatctttgagcgttcattgggggctcccattatcgagctagggtatttcgtaccaattggtgcttgtacccgaagaggctgttttcgtgagaaaatggcaaatcaaggtggtaacacgtttattaacgtccttatctgaaagtaatttttcaggtttgggcgttttttgtttatcgtgatcattcccgcgcaggatgatcgccgccattactaaagtcgacttagcaatggcaacactcatgatttaaacgtggggcaacagacgcttagtctttgaaccacatttccacaacctacaaaatttaaggagtgctgcttatgttagaggaacgtaaactcactaaacgcgattatttcgtggttagttcaatgctttttggtctattctttggtgctggtaacttgatttttccattacatttaggccagctagcgggacagaattgggtgcctgccgcgcttggcttcttagtcactggtgtgttattgccattattatccgttttagcaatcagtatcactcgttccgaaggtgtctatgatgttgggcggcctttaggtcccgtattcgcgctcttattcatgatcttgatccacggcaccatcggcccactttttggtacaccacggacagccaccgtttcctacacggttggcttagcgccactagtaccaaagaatttccaaacagttggtttattagttttctccgctgttttcttcggcttagccctctttttctcattagaggaaaataaaatcgtcaacaatatcggtaagttattaaatccagttttcttagtcttattagctggcgttttcttcttagcttttagttcaccaatgggccacgccggtgttcaacacgccaccgctgcttatacatcaggctctttcgtcaatggtttcttgcaaggttataacacgatggacgccttagctggcttagccttcggggtcaccgtagttaccgccgttcgcaccttaggcaaaaaacgcgctaacagtgtcgcgctggtcactgcccgtgccggcgtcttcgcaatggcaatgatcgccgtcatctacgttggtttgatcttcgttggcgcgatgtccttaggtaaactcaaagtttccgctaatggcggcatcgcttttgaccaaattgtcaatcattatatgggcgtcgctggtcaggccatcttagccactttgatcaccgtcacttgcttaaccacggcgatcggtttagttgcggcttttgcccaagactttcataaacattttcccaaagttagctaccgcacttggttagttctaactactctggcatcattcttgaccgctaatatcggtttaaatcaaatcatcgcttggtcaacgccaatgttgatgttcttatacccactatcaatggtcttgattttattgtcagtcgcttcaccactgttccacaaagacccagtcgtgtataaattcgttgttctctttaccgttgttcctgcttttttcgacatggtaactgcttttccagcggtcgtcagccaaagtagcttcggtaaagcgatgactggcttcgaacaggcatacttgccattcgccaactacggcttagcttggttagtccctgccttagtcggtaccgttttaggggttgccgtccacgtcttcaaacgtgttagcgcccgcaacaccgtttcacaaactaaataggtaagtcaaaaaaacgttcacttgcggtgaacgttttttattgccttgaatttatactttaagtgcaacaaaagagactcatgatatgaatccctgtaaaatggtgtttgcgaagacaaccatcgaagggagcacataatcatgagcccatacaaacatcttaccatgagtgaacgcgaaacgatattcctgatgcataataatcaggcttcactgacttcaattgcccaaacaattggtcgagcaacggcgacagttagccgtgagttatcgcgaaatagatcggcatattcaccttctgttgctcaagagcgctacgaagctcaaaaatctcattgtggacgccggtcgctactttctgatcaccaattgcttcaattaatccggcatttattcttggatctacaatggtcaccagaagaaattgccgcacgcttaaaattagagacctcatcatttcagatcagctacaccacgatttatcgtggcatctactccggtttatttgatcagaagctttcatcacgaggtgccagaggggtgatcagaaagcttagacatcatggtaaatcgcgccataaaaaaggttatgaggaacgtcgcgggaagattcctatatcgcatacactccaagaacgacctgagtctgccaataagcggactcagattggccactgggagctggatactgtagctggcaaaactggcagatcttgtgtggtcacaatggttgaccgttgttcaagatacttaataatgcacaaagcagctaagaaaaactcagccagtgtgaccactactattcgaagactactaaaagatctgccaccagaacacttgggtacgattacgcccgaccgtggcaaggaattcgctaaacatcatcaactaactgaagaatttgggattgatatttagaggtgatatgatggtcaaaattattattaaggatcaacagcaaagcaaagaatatcagttaccaagttatgggagcttaactgttacaactcaaaataataaggtggtgttcattgaacgaacagacaagactaaattagtttaatacctgattggaaaaccaaagggatgcgttactgctagtacatggcaatagtgcatccctttttaatatgttggaggtgtcagagtgtttctttttgatattgatgaggataagagcagacagcaagcagatagattattaaagcgatattggtgagtgaaacatattgcaggtagtgctagtcatttaaagagtcctatttgtgatcatgcgccaaagtcttttagcagtgataatacaaccgagaaacgggcggttaaaacactcgaggcacggcagaccctagaatacatagacgtggctttaagtaagttaacggtaattaacagggaattgccaaagatgcagtatttaagtgctggtaaattaaccatggcttatatctgcggtgaactaggtataacagcatcatcattcaagaagcataagaagcaggctttgctagagtttgccgagtcctaccctagtgaaggcttattaatattcaagaagcattgataacggggatgcagtcctgatttaggatgccatcaaaattgaattaatacttaaggagtgaagcagtatgatcattgaccgaataaaccaacaagcaagtatcaaaaacgccagaaagctgttaaagagctatggcacgattagacggctagccacggtaaatactagtcatcccttacatgagcaggctaagcgtgatttaaagtgtattcaagcggttgtaggaggaatggaggatacgcaagcatccattattaatatgtgttacttagacggtagtcataaaacaaggcaatatatagcggacacgatgggatatagcagatctagttataatcggtttaagaatagggcgttattagcttttgccgaaagctataataatcaggagttgcttgtttataagtaggttgcgcaaaacttcgcaggctagtttatggattagtaattgaataggacaagccattattggtttatccaatgtaaacctacgtgaattagctttaaacccgtggtggtagcctttggtgttaaatataactagacaaaagtagacaaaatgccctttttttatttctatccgtacaaatcagacaccctaaagagaatgaataatgttggtttttgttggacataaaacctaacaaaacctaacattaatttatttagagattttagaggccctaaagaaggagtcacagaattgatgactccttaaagatgagttagtatattgcaacagcatctaatgcactgatatggtgcatcagatacttagccaattatagaaacagtacggctgaaaaatcagccctaattaactttagataccgttgattttaacgagatgttgcccaatccatttttggtttcggctaattgcatggaagcaatctgaggtaccgaaacgggactttagataaagtagaacggtagatcgaaccatgcaataagctaccataatcgttctgttaggtaaaaataaggtgtccgaagagcataaaattccgccccattagcttagatatagactggatcaactttgagcagatgtttttagatagaaatgtgatggcgtaacgaaccgttacccctaaaacatcgccccaaatttgggggcatccctttaactaatgaatacagtcgcgttttacaacggaaactaatgctagtagttgctatatgccccttgacggtctatgtttaatctaggtcgttggtaatgaagttagtccaaattaaaaaacggccactaatctgaccgcctgcagtaagttatgtatatgccccgtgcgtgatttttgttgaatacgtgaatacgggtttgaatacggtttgtcgtattcactgtgaataataatctgctaagaagaaataaaaaagccgttatatcaatgcctaagcacttctataacgacttatcatgtatacttgatgggtggtcaggggatcgaaccctggacccacggattaagagtccgttgctctgccagctgagctaaccacccatatgatgtctcgccttacgacttaaatatcatagcatattaaacaaacttttgtaaacagttatttgtattttttttgaataaagttactgagcgcgtaagaattaatcgttatagggattaacaatgccgttaatccagttggtaggaattgacctaattttgaattgccttctgaaaatgagtataatagaaggcaaagcatccacattcaaggaggatccgcacatggctaaaaaaatactagtcgttgatgatgaaaaaccgatctctgacattgttaaatttaatctaaccaaagagggttacgaagtctacacggcttatgatggtgaagaagccttacaacaagttgaagaggctgtcccagatttaattctattagatctgatgttaccgaagattgatgggctagaagtagcccgccaagtgcgtaaatcgcatgatatgccaattattatggtgacggctaaagattctgaaatcgataaagtgattggcctcgaactcggtgccgatgattatgtgacgaaaccattctcaaatcgagaattagtggcgcgagttaaggctaacctacgccggcaaggtacaacgagtcaatcagataaagaagcgaatgaagaaaatcacgagattaacatcggggatttaacgatccatcctgatgcttatattgtgtcaaaacggggcgacaagattgaattaacgcatcgtgaatttgaattgttacattatttagccaagcatatcggccaagtgatgacccgtgaacacttgttacaaacggtttggggatatgattacttcggtgatgtccggacagtcgatgtgacggtccgccgtttacgtgaaaaaattgaagacaaccccagccacccagaatggttagtgacacgccggggtgttggttactacttaagaaatcctgagcaggagtaaatttgccgcatgaataagaaaattcggttgctacaatcgattcattttaaaattgccattgtgttcgtattgttgctgctggtaacgttggaagttatcggcgcttcttttgtgaagcaactggaatatcagaatgtgcgtgattttaagcaatccttacaagtgacatcctatattcaaaaccaacttagtaatgagttactgaataatagtggtaatgcgaacaagaatattaaagagattattggcgatatgggcaattctgccgaaattcaagttgtcgataataagggcaccattcgaggtgtcacgaacttgaataatcaaagtaccgttggtcaaaagacgcgtaacccacgggtgaaacaggttatttactctgggcataccgaacaagaagtggcatacaatgagagtctagggagctattatacagcgatccaaccgttgacgaacccaagtggggatagtaataccgttgtgggcgccgtttatattcgggctagtatggaagatgtttataaggggatttcgtcgattaccgtcattttcttaacctcgtctttagtcgctggtttattagggatggcattatcgattgttatttcccgggcaattacccgaccaattgatgaaatgaagaaacaagcgattcaaatggcgcgtggggattactctgggcaagttaagatttatggtcaagatgaactggggcaactcgcgattgcggtcaataacttatcagttcgggttgaagaggcgcaagaagcgtcagagtcggaacgacggcgacttgatagtgtgctcagtcatatgactgatggggtcattgcgactgatcgacgaggcaatatcacgattatcaatgaaactggccaagattttttaaatgtgacacgcgatgagttaatgggccagtcattgcttaaagttttacgaatcagtgatgaatattctttgcgcgatctattagaaacgcaacaggaaatggtcttggatttctcagaacaacaagatcacgacttaatcttgcatgttgatttttcattaattcaaaaagaaaccggctatatcaccggtttagtttgtgtgctccacgatgtcaccgaacaacaaaagaatgaacaagaacagcgcgaattcgtttcgaatgtgtctcacgaattgcggacgccattaacaagcgtgcggagctatattgaagcgctgaatgatggcgcatggcaagatccagagctagcgcccaatttcttaaaggtgacccaagaagaaactgatcggatgattcgaatgatcaacgatctattgagtttgtcacgaatggatcaaggaacggcaaagatgaatctcgaatatgttaatttaaacgagttctttgggtatgcactggatcggtttgatatgatgatcaagcgggatcaagagcacaaagatgatttgcctaaactgacaaccagcacgggcaaattgccaacagatgatccgaataagaagtacagtattacacgagacttcactaagcgggatttatgggttgaaattgataccgataaatttatgcaggtgatcgataatatcatgaataatgcgattaaatattcaccagatggtggcgtgattacgtgtcgcttattggaaacacatcgtcacgtgattttaagcatctctgatcaaggattagggattccacggaaagaccttggtaagatctttgatcgcttctaccgggttgataaggcccgttctcgtaaacaaggcgggactggtttaggcttggcaatttctaaagaagtgatcgaagcgcatcgtgggcgtgtttgggttgatagccaagaaggtaaaggctcgacattctacatttcgttgccatatgaaccaattgattctgatggaggtgattgggatgcgatttaataactttttaatgcgcgttatactgattgctgccattatcgtcagtatcgggctatcatggctaatctggaccagtaacgcgcattatgagcaccaaacggacagtcaaaccaccactaagtcaacaagtcgtaagacagaacgaaaaatcggtgatatcttcttgccgacgcaactattgtggcggacagacaatcagagtcagttgatttataactcaaaagagagtttgattccacagtttaaagcgactttaaagcttgccaagtcggcacagtttaagcaagttaagctaagcgaagacgattattaccaggcaattagtgaggatcatacattgacccttttatatcctgataatatttcgtacgctatttttaaaaaggtcttcagttatcagaataataatttaggtcaaaacgtgacattcaatcggattcgaatcacgttgggcacacagcctaagttgtggttgatgaatgatcaaagtcatcaagtgtaccaaacgacactcaatgttttttcacaagctcgtgtgaaaaaggtgcttaaaaatgccgatgtgcatttgaaagtgaccgaaaaaatgttgaatcacaagccattactctatgtggcagcggatcaaacgttgttgccttatagttatttagttaatcaacaacccgaaaattattacatcacaacgctgttgaatcaacaaaatacggataatattgatacgaaagaacaaggcaatagtgcgatttatacggatgggacggacagcaatttgtataaacgcctaacgatcaaccatgataccggtgaaatttcgtttgtgaagtatgaaaatgagaaatcaccaagcacattaacaaagagttttgaagccagttttgatgcgcttttaaagacaggtaacgccctttcagggatgcgtttctatagttatgataaagcaacgaattcgactgcttatcggacctacgttgaaggattcccagtcttttatcagactaactttgggagcgtgaaagtacaattcttaccaactggccaaaagattgatttttcaaattatagtttgcaagtacccgttcctgctgaagacaagcaagtcacattgccaagtaccgagtctgttttgaatcaattgacaagtaatggtttcttgctagaaaatgtggaaaacgtgcaagtcggttatgaatggaccaaagaaaccagtaacgaacaagtgattgatttaaatccaacctactttgtacagtataaaggggtttggcgtagcttatccgcattgatggcgcaaaaagctgaattaaccgaagggagttagatgaatggattttcgcagaattgaaatgatttttatcgccatttttattgcgctggatatctatttatttgcctcgctgaaaggcagtcagacaataacgtcgacggcgattactagtggttcacagactagccagattatgaaggatttaaaagacgatcaaatttcagtgaagaaactctccaagcgccgaatggatggttattatttagccagccgacaaaaagatcagacattattagaaacggcgagtgccaaactaaccggtcaaactgtttcgtttgataaagcgcgcatgacactgacgagtgaattggataaaccactgacttacaaaaaagggaaccaacgcttagccgtggcggcctttatgaaggaaccagacaacgtgattcaagcggaggactaccgctattcacacgcattatcgagtgatcaacaagtcgtatatgtgcaaaaagtcccaggcgggcagatcatggatgaacatggtcagttgatttttacattagaagacgggcagattagtcattacacgcaaacttacacgaataagattcaagttttgcgtgaaaaagaaagtacgaaggtgactgctcaagacgcggtcattgatttatatacagataatgagattccgaataactcacgcattatgtgggtgaaactcggatacagtgctttgttggacgccaatagtagtacggtgtacgtgccagcttggcaagtggccattgagaataagaattctaagagtgtcgtcgttaagcggattaatgcctttaccggtgcgctgatgaagaaccgtagtgaaatttagttgttttagaaagagaccaaggggatagagcaaaacatggtagaaaaagacgcaatgcaagtcagcgtgctcgcaagcagtagttctggcaacacaacgtatattgaaacacctaatcataaagtgttagtcgatgcaggaatgagtgggaaacgtgtgcaagatttaatgcatagtattggccgcgatcttaaagatgtggacagtttattagtgacccatgagcatcgcgatcatagtagtggtgtcggtgttttggcccggcgatacggaatagacgtgtacgcaaatcaaccaacatgggatgcgatggcttcgattattggtgaagtgcctgctgaacacaagcacatttttgaaatgggtagtaccttgtcagttggtgatttagatattgaaagttatggggtgtcacatgatgcggctgctgcccaattctaccaattccatcataataaccgtgcctttgcaatcctgaccgatacgggttatgtctctgatcaagtgcgtgggacaattgaaaatgcggatgcttatttagtggaatgcaaccacgatttagagatgcttcggatgggaaagtatccttggtcattgaaacaacggattctcagtgataccggccatttatcgaatgaagatggggcatccgctttgatgtcgtttatggggaaccagactaaacgcgttttcctaggccacttgagtcaagaaaataacatgaaggaactggcccatttgacggttgcgtcgatcttaaaggaacatgattatggggtgggaacagactttgaaattctagatactgatccggcagttgctgatccattgtttgccgtgtaattagactgaatagaagacattttagttgtttttgcgaaataagttcgctaaaatgcggattagaaaaacaatttaatattcgtaacttgttcataattttttcaaatttacattctatgatagagataatcaataaacagaatttattagaaagtttgggtgaattagtatgaatcagaattcaggattaatgaaaacggctgttgttgccgttatcgcagcactaatcggtggtggcgttgctggttatgccggttcaaagatgggaagtaacactgtctcaagcactgcccaagtaccaactaaagcaggtgccactaaaattagtaatatcaaagtcaactcatcttcacaaacaacaactgcctttaataaggtcaacaaagcggttgtgtcagttgttaacttgcaaaaacaacaagataattcaggcgatttgagtgcgctctttggcgcggatagtaccaataaaaaaagtagtagtagtgagattgaagaatcgagtgaaggctcaggtttaatctacgaaaagaaagatggtaaagcctacattgtcacgaacaatcacgttgtttctggctcagataagttggaagtcatccttagtgatggcacaaaaattgatgctagcttagtcggaacggatgccgtttctgatttagccgttttaaagattgatagtgccaaagtgacgaagaccgcaacgtttggtgattctgacagcattaaacctggtgaatcagtgctcgcgattggttcgcctttaggctcagaatatgctacttctgttacccaagggattatttcagcaaagaaacggacgattgatgtgacggatgaaacaaccggtcaagcgactggccaagcaaccgttattcaaactgatacagcgattaaccctgggaattcaggtggtccgctagttaaccttgcaggacaagtcatcgggatcaattcaatgaagttagcttctaacgggagcacaacggttgaagggatgggctttgccattccaagtaacgaagtggtcaaaattattaaccaattggttgcaaatgggaaagttgttcgaccagcgcttgggattagcgtcatcgatttgacgaatgtttcatcaacgcaacaatcatcagtcttgaaattaccaacctctgtgaagagtggggtagttgttgcatcagtcaatgccaactcagttgctaagaaggcagggattagtaaatacgacgtcattgttggtttaggtggcaaggatgtcacaagtgttgctgatttacacacgacactttacagttacgatatgaatagtacggttgaaattcagtattatcataatggtgaattgaagaaatcaacagtgaagttgactgaagcagcatcaacagatagtacaacggcagcaaaataaattaaagccgccagcatcaattagatgttgacggcttttttattttggttaaattcagactaaagtggcaggaatgttaagttttaaaaatgtcaatgtggatagtaacctgggaagaaatccgagcgtctgtggataagtctgtggattgtgggtataacacggttaaaaggtctttttagttatccacaaaaaaattaacaggcggtggataacttttttaaaattattataacaccagaataacgctgatataaaaggatttgtaaccgaataatttgagaacgaacaatcaaaaaagggtggataacttttttattaaatttaacgaaaaaatttaggtgtcggttatttagtatcaagaaaaattcgagataccatatttgggacgaacacttgtgcatatgtggacaacttttgtggataagcagtactttccggtgaattactgtgaatagctttttttctgcattgttttcccctaaaatgtaagtaacagtaggaggctatttatgaacattaaagtaatcacagttggtaaattaaaggaaaagtatttaaaagcggggatcgcggaatatgcgaaacggctcagtaagttctgtaagttcgaaatgattgaagtcgcggatgaaaaagcgcccgaatcattaagtgacgctgaaatgactaacgtcaaagacaaagaaggcgaacgaattctcaacaagattaaagataaggaacatgtgattgtcctggcaattcaaggcaaacaacgtgcctcagaagaattcgcaaaggaaattcaagatttggcgacctatggtaaatcagatatcacatttgtcatcggcgggtcactcgggactagcgatgcggttaacaaacgcgccaatgatgcactttcatttggcaagctcacactaccccaccaattgatgcgcttagtattgacagaacagatttaccgggcgtttatgattaatcaaggaagtccgtatcacaaatagagataggcataaaaggcctcattgttgaatgaggctttttatatgcaacaagagagagcagcttgcaacaaaacaaatagtcatcgaattaagcgagatcttctgctatctttaggtttgtagaggaggcgagttaatgaaaattatatttaattgggatttaaagtgtgcacaagatacgattgtcgttcacagtcaaccacagaatcaagcaacggttgaatctgcttttaagaagctaacctttgatcaatcgattcaggtgcgagatgcgcgaacagatcgattacaaaacatatcattaacggcaattgaaagttttacggcctttggacatttggcgaaggtggcgacaatcgatggcaatagctattactaccctagtaatttaaaacaattagccccgttttcgcagaacggttttctgagaattaataacacaacgattttaaatctgcagcaagttgccaattttgcggtgggttcaaatgcgcgattggtggtctatacgcaatctggaagacagtatattgttagtcggtattatgccaagcaaataaaggagtggttaaaatgatgaagcaaatccgcaaagactttaatcaagtggcattaatggcgattatgtggctcactgttgtcacaacgctaacgcggggcgaagcgctggctgcttggcgattagttagcctaggcgtgttgattggcgttgtgtttggcgtcatttattcatacttatggcgctattcgacgttcggtgcgccgtggaatgttttgattagtactattagtaatattgggtttcaaatactcgctttgaggctctattcgacaacgttatttgatgttgtttcaccgtatttattagggacgtcgttattaacattcgtaatgcacgtgattattttttattactacacgcgctatcaaaataagcgcttagtgaacgaattgaatcaaaatagaaaataaacttgttgtcccctttgcaggttgtttatactagaggaactaggactatttgttaagtagaaatgaggggaatcagatgacgaagagacaacggaaacgactttggctagcaagcggtgtgattttactaggattagtgattcttctaattggatggcaacaccagaccgccgtttttgctttcttggatcaatggcaaaattaccgccaatatgtgcttgagattcgtcatctggggccgtatgctttcttggtgtttggtctgttaatgattggggtcaccttaattccgggtgcgccaacatcagcggtggcattgattattggcgcgtgtttgggtcattggggtggtttcgtggtcaatgcgattggcttgacgatcgggaacttgttgcaagtccaattatttgcccgtgtcagaaatcatcgcagtaaaaagccggattcgcgtgtttaccgcgcattaattaagatgcaacatccagcgcttggtgtattaattggctatgcagtgccgatgattcctacggcctttgtcaacttggcggctggagacacccacctcaccccccgagcacagggcctggcgtgctttgggggttcaacgattgtcgcgtttatctacgcctttgcgggcgatttgcttattttgaagcaagattggaagagtttattgattctcttgatagtcgctgttgtgattggtttaacggaatatggtatccggatgcggcggagtgataaagctcgccaaaaagtcgaacagtttgacgcattaaattaaagttagaagacgtcctgaggagggcgtcttttttatttgtatgaaaatgtatatgataaggtatgatattaaaagtgattgatatactgaagtaagctcgttaaacgaaataacttatactataataaatataaaagaaaaatacatggggcacgcaatcgtgagtaagaaaaatacacttttggtaacattagcattattattatccaacacaatggcgggactcgatgggacaattatcaacacggctttgcccgctattatcagtgatttacacgggattcaatatatgggctggattgtggcggttttccttttggggatggcggttgcgacccccttatggagtaaattaggcgaacggattggaaatcgtggggcttaccagctggcgacattattatttgcggttggttcgatttttcaggcggtttcggggaatatcgtcttctttctgattgcacgaacggtgatgggcatcggtgctggcgggatgaatactttaccattcattatctatgccgacttatacaaaaatttacgcaaacgcgcgcaggtgattggttatgcgactgcgagttatagtgcggcttcaattgtaggtcccctaattggtggctggattgtcgatacgtttagttggcattgggtcttttatatcaatgtaccaattgccctagtatcaattgtttgtgttcgttatttctttaaagaaacgcttaaatcacatcaaaccggaaacgtcgattatttaggtgctgggattatgattaccagtttggtgactttattgacggggattcaaatgattgggacgggttcgctagcactcgttttaggattggtatttgctggtttagctttattagttgtcttgtttagagttgaagaccgggcagttgatccgattgtgccgaaccgcttatttaaaaatccgcaattggtgaccgactttattttatttgttgttttatggggcgcatttatcgcgtttaatatctatattccaatgtgggcgcaaggtttacttggattaagtgcgctactcggtggaatgacgcagattccaggtgcggtgaccaacttaattggctcattggcgggtcctgcaattcagcctaaattgggtaaacaccgcgttgtgacattgggaacagttgcgtttttaattgcgtttagcggtatgttgatgatgggcgaccaagcatcgttttggttcttactgttgatgggggcctttgaaggtttcgggctcgggatgagttttaacgtcctacaaatcaatgttcaagaagatgccgaagaacgtgatgttcccattgcgacgtcgtttgcctatctcttgcgaattctcagtcaaacattcatgtcatcgatttacggtgtgattttaaaccatgccttaacacgcggcattgccgaatcgcacggtcaaattacgatggcgatgatgaataagttaagcaatctccaacgcgttcacgaattaccagcgcacttattaccagcgatgcgcgcgattatgtaccaaggcttgcataacatcatgctgattgcgacagtcctattggtgattgtgctcgcgtttaatatctggttacagatgaaggcgaaaaaagaaaattaaaaaaagtgttgaaggtcgtgagtaagttggccctcaacactttttttaataataatattttaaatcactcgccgggcttgggtagttatagatggtatcggtgagttccgttgcggttgtctgatgtttaatcaggttggtaaagtaattaatgagttcttcagcaattgtggtgtaagccgcagcaccgacgagttggttagtttgattgtcaaaaatggtgatgaccattgcgtcggattcttgaatacgattgaaggtataccaatttgtgacggtttgttgattaatgcgatattgactaggagcagcttgtgcagttgcaacagaaacgcctacttgtgatatttgtgggcttgcatataccgtatgtggaatgagtgggtaagtaatgggtgctgtctttttagcgagtagttgattggcgacatagcggccttcaaaaccagcaactggtgttaatttgggttggacacgatctacgacgtcaccaatggcaaagacgcggggattactactcattaaatggtcattgacttgaatgccatgctggttcgctgttaccccagctttttccaatgccagttggtcgatattgggtttacggcccattgcggcaaaagcggcgtcgactgtcagtttgaaattagcttgattactgagagttagctgattgctggtttgcgtaattgttgtgacgtcagtgtcaaaatgaaagtgaatgcctttttcctgaagactggtgacgagtttatgtgttaaaacttcagggaagtcgcgtaaaatacgctcgttatgttgaataatatggacttctgcaccagcagtaactgcaatatttgccagttcaatggcgatatacccgccaccaataaaggcaaccttttctggtaaacgatcgaggtctaaaaattcattactggtttgtagtaaatcgtgaccctcgattgtagggagcgttggtgtttgaccggtcgcaatgatgaaatggttggcagtgtaagtgccaccattaatctgcaaggtttgagcatcactgaagtgggcggtgcccgtgacggtttggatgccggcatgttgtagaccgttgagggtaccagtcgggatttgttgcgtataagatcgcttaaaggccatcagttcagaccagttaatagcgctagttccgactaagccatttatttggagtgcttgttgattgtcgagtgcttcgacagctgaataaagcatttttttaggatcacagccacggttggggcaagtgccgccccataaatcattttcaacgactaagacggactgttgttcagcgagactgtaagccgccgctaagccgccaggaccgccaccaataatgattgtatcaaaatgtgtttgcatattaagacctcctcagatttcaattcgggttcatcttagcatagtcacaaagcgaatcaaaaaaattggattgggcgtttaagcacgtcaattggtgggctgattgctaagtggtacaataaggtaacaaatcgttaaccggcaaaaggagtagcacatgattgaatttgaaggtgtcactaagcaatatgaacaaagcttagcattagatggcttgacgttaaccattccagacaatggtctatttgttttggttggaccgagtggtagcggaaagacaacaacggttaaaatgattaatcggttaattgaacccacgagtggcacaattaagattgacggccaacccatcaatcaaatggatctccaaacgttacggctcaatattggttacgttctacaaaacattgcgttgtttccacatctcacaattgaggaaaatattaccattcaattagaggtattgaaatggaccaaagctgatcgtcaaaaacgggcacgcgaacttttggaaatggtccatttagatccggatcagtatgctagccgttatccaagtgaattatcagggggacagcagcagcggattgggattattcgtgcgttagcaactagtcctaaggtgattttgatggatgaaccctttagtgcacttgatccggtgacccgtacacaattacaagatctcgttttgagtttacaaaagcagctgcataatacaattgtatttgtgacccacgatatgaaagaagcgttgcgcttgggcgatgaaattgcggtaatgcgccaaggcagtattcagcaagtcgggacagcaaaagcgatttttaatcaaccaaaaaatgaatttgttcgcgaattttttgacattgaacgccaacaagcatcgttgacagttcaagatttattggcggccgatttaggaactgttgttaataatcagccgccaacgattacgtccagtgcaacattagctgaattagcgcaacaattagtagaccatccagatgggggcgtagttgccactgatggtcaagaacaacggcaattgacgatgaccgatttaacaacgctcattgcgaaacggggggtatgacgatgatgcaacagattgaacaaattttaacgacccaatccggtgagttgctacaagcacttgggcaacatttggagatttcgttattggcgttattaattgcggcggctatcgggattccgttggcgattgttttaacagctcatcagaaattagctgaagcaatgctgcaagtcacgagtgtcttacagacaattccgtctttggcgctcttaggattattgatcccgcttgtcggaattgggacgattccggctgtgattacgttagtactttatgccttaatgccgatttttcaaaatacatacactggtttgatcggaattgatccagcattaaaagaggcagaaatagccttcgggttgccgcgcgctaaacggctactacggattgaactgccacttgcgatgccgttgattatctcgggtttgcggattgcactcgtgatgattatcgggacagctaccttggcggccttgattggtgcgggcggcctcgggacgtttattcttgttgggattcagtcaaataataacgcactattactggttggagcgacactttcagcggttttagcgttagtggtcagtgcattaattcgctggttagggacattatcctttaaaaaaatcacagtcagtttagccatttttgttggccttttcggtgtgatcgaaggaatgacacggtttcaagcgccgcagaccaccatcacgattgctgggaaattgggtagtgaacccgaaatcttgatgaatatgtatcgtgatctaattttagaaggtcagcctaactacaaagtaacggttaaacctaatttcggtgggaccacattcttatttaacgccttgaaggctgataagattgatatttatcctgaattcacaggaacggttttacagacgttggtgaagtcgccaactaagacaaaccagaatccaactaaaacgtatcaacttgcaaaaacatcgctacaagaacagttcaatatggcgtacttaccgccaatgcgctatcaaaacggttatgacttggcggttactgcggcctttgccaagaaatataatgtcaaaacaatttcggatttagccgctttgaatcaaccatttacggccggttttgatcctgatttttatcaccaaaaagatgggtatcaagggttaaaggacacctatcaattaaatttaaatgctaaaattatggagccaagtattcgctataaagcgattgcggacggcaaggtcgatgtggtcgatggttatacaaccgatgcggaagtcgcacggtacaaactagttgttttagaagatgatcgtcacttcttcccgccttatcaaggggcaccgattatgaaagccggctttgccaaggcgcatccggaagtcgtcaaagcattgaatcgcttggcaggtcagattactgagagccaaatgcaagagatgaactaccaagtacaggtcaaacaccgcaaagcacgcgatgtagcccatgattacttggttaaacagaaattaatcaggcactaacgaacaatgcttgaccttcacgtcacgtcaggccttatagtgggttttgaaggagggaaggcaaatggattatcagattaaaactttcgctgaattgaccggggtttctgagcgtacgctacgttattatcacgagcgcggtttactggtgccaacggttgctagtaatggttatcgaacgtattcgagccaggatgcagatcgactgcagttaatcttaatgtaccgtcaactacagtttagtctggctgagattcagcagctgttggcgttaccaccggccgagcgtctggaacgcttagcaaatcagcgggaacaactggttaaacaacaagctgcgctaacggcaacgttagcacagctagatgcgacccttcaaaatcaaaccggaggaattcaaatgacagatcaaactaaattcaaacagtttaaacaacaggcagtggctgaaaatgagcaacgctacgggcaagaagtgacgactaactatgggaaacaagccaagcaagaagccgatcagcactttttagggctaagtgaggcccaatatgcaacgatgcaggcggctgaagaccgattgaagacggcattacaaacttacttggaccagccgcaattgccatcagaagcggcgcaaacagcctttgaagcccatcaaacgtggttacaaacagcgactccccggtatagtctagcaatgcaccgcggtttagcagccatgtatgtagcagatgaacgatttacagcatactacactaagttaattggagatcaacgcgcagcggaggctttacaaacgattattgaatattatgcaattgaagcctaaaaaaggactgacatttgtcagtcctttttgattatttagcgggaattttccgtaatacccgtgctggattaccaactaaaattacgttacccggataggatttggtcacgacactgccggcaccaacgacaacgttattgccgagcgtgattcctggcagaattgtgacatttgcaccgagccagacgtgattgccgatagtaatgggactagaaatttctttttttgtcgcacgttctaaggggtcaattgggtggtaaggggttaagagtgatactcctgggccaaatttacagtagtcaccaatggtgactggtgcttcgtcacaaataacgacgttacgattggcgtaaaaatgatcgccaatcgtaatgttttcaccgaagctaaattcaaaaccggtttcgatgaaaaaatcgctaccggtatgaccgagtaatttttggatagtggccatccgtgcatcgttatctaagatttggctggccttttgtaaggcaaggcgggctgcatcccgtttttgaatagtgaccgctgaatcaaagtaccattccccattggtcatcgccctaaaagcgtcgtcagtttcgtgcatattataagtcgcctccgttaattgtactctctaacgatagaacaatttatcctggagtgcaaatcgggttagtgattgcagttcggaactatctatgggatgctaatcatagataatttttggagggcaatacgatggataccaagcaaaagctagcagataccttaaaagaattgatgaaaacaactccggtcgatcacattacggtcaatcaattgacgagcagtgctgacgttgcgcgcaatacgttttattaccatttcgccgatattaatgagttggttgcttggatttataatcgtgaaattgttacgcaactggcagtgtatcaacgtgaacgggattgggtcgtcggtctaggtgtcttggtaacttatattgaaaacaatcggcatttctgtttaaatacgtttcattcacttaatcgagatttactaagtcgttttttgtatcgagttgcttttaacatggttgcaggggttgttcaagatttaaaggtggattgtccagcgactttccgagatgaaattgccaattttatggttgggcattggcgacacagattacgcaatggcttgtaacaaatctacaagaatctaaaaaggaattttatcagcgcatgcatcgcatgttaaatggtactgtgaaccatgttttacaaaataatcattagatttggacatttatcctgaattgaccatacagaaaccgccagcttgcagttaaagtaagaatgtaattagcaattatttctttggaggtgactgatatgtttttatttcaaaatatttcaggaatggattggctagtttggggactagtggttattgcattaatggttttaaatgaagcagctcgggctaacaagtggattggattaattctctttgttgggttgccagtcgttttaacgctctttgtttggccaacgacggctggtcctggtagcagtaccgggacttggttccactgggttaaagtgtactcagcattagcaggttgtttagggtttatggcgctgcgctttatccctaagttacaacataacaagtgggcattgattttcccacccgcaattttagcgtttaatattatggaagctgtgattcgtgattttcaagtttcacacctacatggcttagtcgacggcgtgatcatgaatggtggcgcgtggaacatcatgaatggggctgccgggattattaacatcatcacaatctcaggctggtttggcattattatcagtcatgacaaacaaaaagacatgatctggcccgatcaaatctggccttggattatcgcctatgatgtttggaacttcgcctatgtttacaattgtgttggtgatcactcattctatgcgggcgctgcattattaatttcatgtacattagcagcattcctggttaaaaaagggagctggctccaagcacgtgcgcaaacattggctttttggatgatgtttacaatgagttatcccgcttttgtaacggattcacaattttcagtgcaaggtacgcacagtagtgctgctttgatgacaatcagtggtttagcactggtcattaatgtggcagtcttaattctccacatttatcgtgtcatgaagtataaacgcaacatcctaactgacgaagtctatgctggtacaaaggcctatgaccaagtcgtggcagaaaacacgccggaaggtgaataaaacgaggctcaatgaaggcgcagttcaatttaaactgcgtctttttttgcattttatagtatgatagatcctataaaggtgggatcaacatgacaactttttattttgtacggcatggtgaaacgatggttaatcgagtacagtgtttcaatggtggtgggacgaattcaacattaactgaggcggggcaagcggctgctaaacgactaggtagtttattagcggaccagtcttttgatgcgttactgacgtcaccattaacacgtgccgttgaaacaatggatgcgatagtgtcgcagactaatcaatcacaaccggcaatcatggtcgtggatgatttaaaagaaatggcacttggtgattgggaaggccaacctggtgctagtttgacgaaccatccacaatatgaaaattacttccatcatccagagctgtttgatgccaaacagattcacgcggagtcctaccaggcggtcttagaacgtgggatgctcgcgattaagactgctcaaacggcgtatcctgatggtgatgtattagttgttgcgcatgggattattttattgtttgttatcaacacactactagggattccgtttgaggaaattcgatcacaaaaaatggttgctaatgcaagtctatccgtactaaaaagtaaaggcacgcagtttgaaaaggttgtgtggaacaaaacggtttaggaaggatttctggatgacaataattatgattcttttgatcgttgcgttgggcgcttttaccagaacggtttttgggtttggcgaggcattagtaacgatgccattattggccctaatagcgattgatttaaaagcggcaacggctttgattggcgcgctgggactaattgtggcgattccggctgtgattcgccaccgccaacagattgatatagcggttgtcagacgactagtgattggttcattattgggtgtgccagtcgggatagcgctgatgacgtatgtgccaacgacgattgtgttgagaacgttagctgggtttttaatcctttatggcagctataatcgctatcagttacaccgacatcacgtgcagcagcaacatttacagtcacatcattgggattatttagctgggataatatcaggcatgatgggcagtgcctacaatagtcatggtgtgccggtggtgatttatgggacattaaaaaaatggccagtagcatcgttaaggggcattctacaggcccattttatttgtgttgggacaatcgttgtaatcagtcatattctagcgggcttttggaccatccaagtattgcaactattgggacttagcttaccattattgttagttgtgattccgctgggcaattgggtgagcactcgaattgatagtcgaacgatggtgcggtatatttatgacttattaatcgtttttggttgtttgttgctgtataaaacgttgtaaaaggtcattaataggtggttggtttattaaatgatgtaaagcttatggacagcgccgcagatagtatactaaaatgatagtgtataaagtttaaatactaaggggcggaaattaatgagtaaagtattagttgttaaagcgcatccacttgctacagaacagtcacggacgttaacgattttggcgcagttcatgcaagtttatcaaaaacaaaatccagctgatgaaatcagttggttggacttgtaccaatctgacttaccagaaattgatcaagaactaatgacggcatgggcggcgttaaaagaagggcaagctatggccaccttaagcgctagtcagcaagagaaggtcgctcggtttaatcgctataccgaccagttcttagcaaccgataagtttgtgattgttaatccgctttggaatttaaatgtaccgacgaaacttaaagcgtggattgacacagtgatggtggctggaaaaacatttagacatactgaaacagctccgcagcccttagtaactggaaaaaaagcagttcatattcagtcagccggaagcgtttatgctggccaagattttgcaacacaatacattaaaacaatccttggctttgccggtgttgacgaagtcattaaaattaatattgaaggaattgatcattcgccagaaaaagctaacgtgatcatgcaggaagctattgaaacagctaaacaaacggcacaagttttttagaggcgatatagtggagggataaccatggattttgaattaccgatatatccagaaaatcaggcggcaatgaagaaatacatgcagagtcaatttgaatttaacggtgttaaagcaccggaccgccatttaattgaacgcgaattgtggcagtctgtgaaacaattgtcaccagcagaaataatgcagttcattgagactttatatgctcaaccaacgcgtgagtatcaatatgttgccatcgagatggcattgcgttcagtacgttggtgggaaccggctgatatggaacatttattaacgttggtgttggaaaaagtttggtgggacagcatcgatgcttggcgaaaagtatttggagagtacatcagactgcatcctgaacagtttgattgggttgcacagcattttataggtgctgagaatttctggctgcgccggattgcgattacgctacaactcagtttttacgaaaaaacgaatgtggcgtttttggaagaagccattctggcagatattgacacagatgagttctttatccaaaaagcaattggctgggctttacgtaactatagtaaggaaaatcctgagtgggtgatgacgtttgttgaagaacacgaactaacaatcttcgcccaacgtgaagccttaaagaaaatcaaacaaaacaaaatgtttcacaggaaacatacaaaaagcagcacccatgataactaatcaagggtactgctttttaataacttaatttaagagggtaacagctaataacaagtattaatggtactaggataagctaatttattatttatctaaacccgccagaactttagccggaatttgattcttggacacagtattaggcccttttaagacgcgttttgaattaaattcaactttgacatagctgttgggagtgagtggcgttggattttcgccagtaacttcgacagggaccacttggtggctaccatcttctttcaccacatttagttggtagtgatagctatacatattagtcactgttttacctgaatcatctttggtggcttctttagctggagattgagcagcaactttggcgtagcctacttcgccgacatacgtatttttgtattaacggtagccagcaaatccgacgatgatgagggcgattatcgcaataatgctaattgttttttttcattgaatgagaactccttattccgaattgataaagttatcatacgatgttaagcgtaaaaaagcgacgattttaagatcagatgacaaaagtgttagccgagttaaggccattgtcacctaatgtttaaattggcggtattgtgcttctaaaatagcgctatctaagatgtgaccgcgcattgccgctgtcatttgatttaggtaaaagccaggctgtaaatcgagcgtggtatcaagtgcaaatactttaagtgtataagtgtgatcgcggttagggggtgtcatcccgccgtagcaagcacttgcttctgttgataaatggtctgttttgggactgtgccaagtattaacaccttggatgaaatcgggcgcttgttggctagcattagccgcgacagtggtcgtttttaaattggcaagtgtccagtgaatccaaggaaacccttgcgtcacttcgtaggcatctagatcgtagaaaacggcagcataactgactgtatcgctaggtgcgtcttgaatgttaaacggaatggaataagttggcacaccttccgcgttaaattgagtgccatgaccgccgtagaggtcgtcgaagtagccgtgatgaatgccagaactgataatttgcatgttgaatctcttttctattttagattttagtccagtcgtcaattgagcgaccatttgtgtcgcatagttcgagccaactattggtgccaccaaagtacaagaagaggccgatttcattcacgctcttgaaaataatgtcttcagtcgtttgattgtcttgaatttgcgctgcatgttcgttgcgcaagtgagtgcccattttagcagcaaagccaaacgagccatccttattaagtgacgcggttggccataattgtgcccccgctttcaataacatctctttgcgcttttgccagatggctgttccttgtgcttcgcgcgtagcaacagtgaattcgatttggctgacggcttttgtccatcgatgacgtgttttagccggttttgctttgactggtacgcttttggtcaggggataaccaaagcggctgaggaccaagatgatggcttcaacggctggagctaaggttgttcggaaattttgagagacgttggacggaagcgaggtgctcgttatcggtggttgattttgttcggctaatagctgccctacgtagccaatttgttcagtccactcaggatccatggtaatccagatacccgtgtcaacttgatcagtcgaggctgtttcaagtggggagagttgttcaatttgttgcagttgttgctgcgcaaaaccgaggaataaagcggggtgtgcgaatgcggttgtattagccggtgtttgttcaattaaaagctgagtaacgggttgttcgattaaatcgacgatcgtttgggtagccgttaatgttgcattaatttccaaggtcataggaagcctcctgacagtctttgatgcttctaattaaacactaaatcgctggttttgtcagccagtaagaattgattgaaggaatgcttgaaactgagattcaattaaccggaattaacgaatctttgttatgatagaaggtaggaattttaacgggtgggagaaatggcatgcaagcacaagcggtactaaaagaaaaatttggttatgatcactttagagaaggtcaagcagatgtgatcgaatcattgttggcaggcactaatgtcttggcgattatgccaactggtggcgggaagtcattgtgttatcaaataccagcattgatgctacccggtttaacgttggtggtatcaccgttgatttctttgatgaaggatcaagtcgatgcgcttaatgaaaatgggattccagccacgtttatcaatagtacgctaacgcagggggaagtccaagaacgctttaaccaagctgcgcgtggtgaagtgaaattactatatgtttcgccggaacgcttggattcggattactttttagctgatttagctgaattaacgattgatttgattgcggtcgatgaagcgcattgtatttcgcaatggggccacgattttcggccaagttatctacgcctgacggatacgattcagagtatgcgccaacgaccaacgattgtggctttaaccgctacggcaacctcacaagtggcagctgacatcatgcaacggttgaacattcagcacgaagttaagacggggttttcacggcagaatcttgcgtttcaagtagttaaaaatcaaaatagtgatcgctacttaatcgattatttaaaggtcaacaaacaaaaatccgggattatttacgccagcacacggaaagaagttgaacggctcacgaagctgattgaaaaggctaagttagatgtgacaatgtatcatggcggattaaacgaagcggtgcgtcgtcagaatcaagaggattttctctatgatcgcaaaccgataatggtcgcgactaatgcgtttggcatgggcattgataaaagtaatgtgcgctttgtcgtgcatgcccagattcctgggagtttagaggcttactatcaagaagctggccgggccgggcgtgatggcttgccgagtgaagcgattctattatttaaagtgaatgatgtgcagattcagcatttctttatcgatcagtcggaaatggacgaagcgcataagcaacaagaatatgccaagttgcaagaaatgacgcagtacgccaatacgcagcaatgtttgcaacagtacatcgtcaattattttgatgatgattgtgaagcgtgcggccggtgcagtaactgtctggatacgcgtgaagaacaagacatcacgattgatgtacaaaaagtcttatcgtgcgttaaacggatggatgaacggtttggcaaagtgttggtggcgcaagtattgacgggctcgaagaatcaaaaaatcatgcaattccgctttgatgaactcccaacgtatggtctaatgcgtggtgattcgcaaaaagaaatcagtggtttgatcgattacttagtcgcttcaggatatttgcaagcttctggcggtcaatacccagtgctgcaaatcacggcggcgggagttgcagtcttaaaaggccaagcgaaagtgacgcgcaagatggcggtcaaagtgcaaaaaacgttgcctgaagataatgaattatttgaacaactacgtgagttacgccgcgatttagcggaagaacaaggtgtgcctccgtttgtgattttctcggataagaccctatattcaatgtgtgaaatcatgccaacttccttgactgaaatgctagatgtcaaaggggtcggcgaaaataaactagaaaaatacggcgaacaattcttggatatattaatggcagaatagagtgctgagcattgactggatttaccaaattggcgatgtaatcgctgatttggtaaatttggttaagtgcagaaatatgctggcgagaacacgtttcaacaaaaaagcgtcaacggattctaatatccgttggcgcttttttagtatctagtatggtgcatctgctggattaccatattcaaagtgttggtttgactttggattgggtttcgcatcaggtagtaaacacgtataacgtgtaccatcaggaccttcagctaggaagatgcgagtaaaatcattttcagtttcgatcagcttgcagttttcgtgggttaacccataaacatcagttacttgcgtaataatcatctctttttcttaatttgaaaggggtagagtaaccgtacattctaccaccgacttaataataagtatagacttttattgataaaatttcaaattaatccccttatttggtttgagtttcaagctggtggagggtttgtttcaattcaagtccgccacgataccccccaatttgcccgtctttacggtagacgcgatggcaaggaataatcattaatagtggattgcgaccaatggcagaagccactgcgcgaattgcggtggggtgcccgacttgagctgccaaagcgctgtaagttgtggtttgaccatatggcacagcttgtagggcgacccaaacacttctttgaaaaggtgtgccgccgataatatcaattggcagtgaccacgtggtttggtcaccatcgagataagctgttaatgattcactataaggagcgattgcagcttgatttgcaactaatttcgtttggggaagaaaagtggttagttcactgatagtgccatcgggtgaaccaacaaaacagatacctttgggggttgctgcaataataaatgattggccagcatggctaaaagaaccatagaagattgttagcatttagaagccctccttttgattgccctcagtatagcatgcccgttaaaaaacgaccaagccgtaaacaggctcagtcgttttttacttagttaagcaactggttgaaaggttttattttgaagatgatactgaacatcacaacttgctgcgacttctttttcatgggtgacaagaatcacacatttttgttgttgatgggctaattcttggaagagatgaatgatctcctgcgtattttgttcatctaagttaccggttggttcgtcggcaacaacgatgggggctgaacagcacatagcgcgcacgatcgcaacgcgttgttgctggccacctgatagtttttgtacgttcttatgggcgagttcgggattgatgccaaccttgctgagcatttcgagtgcgaaatcggcggcactttcatgcgtcgaatgagtaatggccatcgcagtcaagacgttgtcgagtgccgacatgtaggggagtaagttgtaggcttggaacacgatggacacatagcgattgcggtattgggttaagccgattttttggatatcggtaccttcgtataaaatactcccgcggcgcggtttatctaaccctgaaagcatggtgagtaaggtcgtttttccagcaccactgctaccgatgatgccgtaaagtttgccggcttcaaaatcgagattaacatctttgtaaagtgtattttcttcagtatcgtaccagtaactgacgtttttagctgttaacatagtggacctcctataattatccaatgagaattttgcgtggctcgagtcgtaaaatattgagtgatgcgagtaagacggcaaatgcgatgatggtgaagccgaatgcgccaagttgcattaaggtgacggcactaatcttcagatcaaggtcgcttgctttgacggcttttttagcagattggccaggttgttgcatttgaccacttggccgattgccaccagtttgcccactaggggcttgaccgccaccagggccgccgttaccgccaggttgcatgttatttgtttgtgagctggttgtcgtttcggttgtgacggaacgcataacttgtttgctaagcgcttgaccagcgaatcgtccgccaatgccggctaaagctaaactgacaatcagcagcatgaacatttcaactaataattggcccacgattttgacgcgcttttcacctaatgagagtaaaacgcccatttcataacgccgttcgcgaaccattaagataataattaatgcgaggataacagtgccagcgatagcgactaaccaaacaatcttattagcaaaactggccattttctgcatggattgtttgagtgattggtaagtactgtcatcagctgttaccgtgaatttcttcgtattgataatcttcttcgctgcttttacaaaactatttttcttagttgggtcactaagcgtgaatgtggcactatccactttgccagtttgacctttaatttggttagctaatgtgtatgccgtatagatgacgtttgcggggtctgtttgttgtggacccatgccaccgctactttgactagtcttatagatcccgactacttttagcgtataggcttttttgcctgtcgtgctggctttgactttaatggtgtcgccgactttgaggctgttttctttagccaattcagattcgatgacgacattactggtgtttttgtcgctactatttaaagcgcgacctttcgtgattttacttgtattatctttaaagtcgctgagggttgcggtattgagcactccggtgatttgtaagtcacctgttgaagtggatgactcagcgttgccgccagggccgccgcccatcatgccaccactattacttgaactacttgatgtcgtaatggctttaatggacgaggcgttcgcagaagtcgtgacgctgacgttataatttgccagcccggataatttcgaaatagccgttacgtcttttaatttgacggagggcatggttaatttagggcgcgttgctgtagtacttggggcatcactgctagccgaggcgcgcattttcttaaacgcttgatcgcgatttgcagaaagggtgacgctagcgcccacctgttgtttggtattgttgacggttgtaatggctgcatttctaatcaatagaccagccatgataaaaatcatgatgacggtcatcacaattattaataagaagctacgcccttttttaaagatgacgttttgccaagcacgcttgataaaattcataagtatttcctccttaaaactgaataaatattagtttaggcggtaaatatgaataaattgtgtttgaaatgaagttttttttaaggcgtatttgtgaagattaaccttatagggccaactttctagctcctaaatatggtaaattatagggtatcaaagttaatcggaatgaggagagttaaatgaagaagcgacaacaattttttaccttattatggacaggattaatgttaataatgcctgttgtttcagttattggtagtgcacaaacggtgtctgcgagtgagacaaaggttacacaagtgacaccacgtactgcatctagtacggattatcaaaaagcaatggtggctggggcgcaacagttggtgaataatggccaaccagatgcatggtcagcgttagcagctattcaatcaggcgtgacactgagtgcagcgcaacgcttgagttatcataatgccttggttgcggatgcacaatcaatgctcgctgatcaacgtttttcggcaaccgatttagaagtgttggtaattggggtaacagcacttggtgaagatgcaaccaacttcgctggtttaaatataattgataaaattattgaaaaagcaccaactggtgggatcaacgggcaagtttacggcatcatcgcccttagcatgcgtgattatggtgccaaggcacagcaagcgattgatagtttaattccaacggttttacaagcacaaaacgctgaaaatggctgggcttttttcggtagtaaaagtgatttagatacgaccgggatgacgatgacggcgttggggatgcatcgtgacttcccaggcgttcaagatgcgctagataaagcggtaacgatgttgaaagaaaaaacatttgttgcacaaacgggtggttttttaatccctagtgtttatatgacagaagaaaactcaaatagtacggcaatggttgtcatgggcttaattgcagctggagttgatccagtcacaacatttgttggcgatcaaggcgctaacccgatttcacggctggtcgcttatcaaagagcagatggacagttccgctggaatattaataacgatatgggatcgctagcgatgtcaactgaacaagccgtttatacgttagcccaataccggttgttccaagcgggaaaaggctcaatttatgattttaaaacgccagttattgaaaaagcatcggtaaaggtccaagcagttgatgaaaagggacaaattttaaagagtcttcaattagctgaacaacccgttggtcaaaccattacggtgaatgctaatcaagtcgcagttgagggttatgaattattaggcaatgcacaacaaactgttcaagttgctaaaacgggaacgaccgtgacgttccagtatcggaaacaaatgattgggacaattcctgcagcgcagtttgctgacgttacggtgcaagcagtcgatcaaaacggcaaagtgtttaaaacaattcaattgcagcatcaaagagttggacgcacaatgttgattaatgcatctgatgttgcagttgagggttatcaattaaaagacacgccaaccaaatccatcacgattaatgcagcgaataatacaatcagtttcaagtttgaacgacaagtgactacggttgaaaaagaaaataaacaccaagcagacaatcaagatcatgctcaaataaagcaaaagcaattaccacaaacgggtgttaactcaacagtagttgcttctgtagccggcttgatacttttgactgggattattggcatttggttcaagcgtcaagttgaacatcgttaggagttagatatgtctaaaaagagaatcattgcgattatcggtagtttagttattttaagcggcatcggatacggtacctatcaaagtgtggctcaagataatccgtctacgcgtagtcaacatgttaaagaggaacatagatcaaaaaaacgggtcaagccagcaactgttggtttagatggtaaagttaaatctaaggcctctgagtcacatagtagggcggtatctgaaagtcggaaaacagctgaaacgcgcaagtccagcagtcaatctgaacagacaaatgaatcatcacaaaaatcggcctctagcaaacaattagcatcgcaacaagctgtagaacaaggctcggcagtccaatcggcatcgacccaatccgccattaatcaatcgtcacaatcaactgaaagtaaaccagttacaccgcccactacgacgccccaaccagtccttgaaaaggtgagcgtcaatgtttatggaccaattagtgaaggtaatccgaaatggttgaacggtgatcaagttgaaatcaaggatggggatatggtgattgatgttttaaaacgtgatttgcaaagtcgcgggatggcactatcctatcgtgggacgggcggcggcgtctatatcaaaggcattaatgggctattcgaatttgataaaggaccgttaagcggatggctttatcgagtgaatggcagttttcctaactattcttgtggtaattatcctgttaagagtggagatgtgattgattggatgtatacggaaaatctcgggaacgatcgcaacgcgcctcagggttaaaatcgcaactggtctttgatcaattaaatccaatcgtcatctttgcgtattacgtgattgcaattgcgttctcaatggtttttattcatccgatttttcttgtaagtgaattgttgatgatgattgcagtgaacttgcttgcgaaaaaccagaagaaaacactggggacattgcagggtgcattgttcatgatgctctttatcgtcgtgatgaatcctattatgaataatcatggggcgcacgtgattgcgacgtttggtgggacggtgatcacagcagaggctgtcatgtacggttttttaatggcgctttcgctggcgatcttaatgctagtgtttgtttcctataatcagagtatgacgaatcataagttcttatatttatttgtgcggatttcaccgcaactaactttattaacgatgattacgatgcggtttgtcccactatttattcggcggtttaccaatatcaagaatgtccaaagaacacgtggtgtgcagatggaaacggggagtgttagagcccgatcacatgccgggatgcgtttgatggaagtattattgattaattcattggttgacgcactacaaacggctgattcaatgacggcccgtggttatgggtcacagaagcgaacgagttatcaacgttatcgatttacccaacgggatggttgggtattggcaagtcttgtagcaggcagtgcactttgtttttattttgctaaacaggggattggccgcttagcgatttatccaatacttggctcgattcatttgaatcaaattggttggctatgtttagtgttagtcttattaattgatagtttgccgctattactagaaggatgggaatatttatggtggacattgcgcaaataaaacaatttaattttcagtatgcattagcaacccaacaaaatctgaaagacattaatttaaccgttcagacgggtgacttcattacgttagctgggaactcgggtagcgggaagaccaccttattgcgccaactcaaaaaagaactctggcccgttggtaaacggtcgggtgagattattttcgagggccaaccgttagctgatttatcgcaagggttaagtgcgcagaagattgggatggtctttcaaaatccggataaccaattagtgatggatacggtcattcaggaactcgctttttcactcgagaatattggtgaaaagagtgcaaatattcaaaaacgaattgccgaattagtcagctttttaggtttccaagatttgctgtatgcttccgtgcatgatttatcgggtggccaaaaacaactggtcaacctagcgtcggttttgattttacagccagatcttttactgttggatgaaccaacagcgcaactcgaccccattgcgaccaaagaatttattagtttattgcaacgggtacatgacgaactcggcatcaccgtgattatcagtgaacaccagttggatgatattttaccgctctctaatcaactttggttgatggatggcggtgagataacgtatcaaggaccggttgctggtggattagcagcaatttgggcgcaaccggcattgcgtgaattcgtcccagatgtgccacacgtctttttacaaaatgagttgattgcaccggctgatattgcggcattaccattgaccgttgtcagtgggaagcaattgattgagcggcaacaatggcagttaacgcatgctaaacgtaaaatagccacgaacgaccaagtaacaattctgcaggccaaacatgtgagctttcagtatgaaaaaaatgacccttatgttttagatcagctcaatctagaggttcataccggcgattggttagcgattgttggtaaaaatgggactggtaaatcgacgttgttgaagcttttgattggtttattacaaccgcgccatggtgcaatcaagttacaggggaagaagatcggtaagtgggcgcaagctgaacttttcaaaacagtgggttatctctcacaaacaccgagcgatcatttcagttatgatagtgtccgtcaagaatttatcgaacgggcgcggcagttaaaacgcgtaacaccagaacaagtggcagaagagatgctagcaaagctcggtcttcaaacccttgctgaacgtaacccgcaagatgccagtggcggcgagcaacaattgattgcactcgggattgtattgctagcgcagccgcagttactcttgttggatgagccaacaaagggccttgatccgattcgcaaacgggcgttgggtgaattgttaacgcgtttacaagcggaaggcttaacgttgattatggcaagtcacgatatggcctttagtgcccggtttgctagtcagtgtgccttattattcgatgggacgattgtatcggaggaagaaccttatgcctttttcgcgcataacttcttctatacgacaaccatcaaccgaatgttacgcagtcaattgcccgaagccctgaattgggaagaggtgcacgcatgaaagctttaaaaaatagttggaccacgtttggattggctttcttgattatggcgattttcatgttgtttatcgtcactttaaaaggacagcattttctgatcttcagttttatctgtttgattgccagtatgctgccattttattggcggtttgaaacccgggatattcgcgcccgtgaaattattttcatcgcggttttagcggcgattgcggcagtcactcgggtaccatttgcaccattgcccagtgttcagccaactagttttgtgattatcgtgtcggcattagtccttggtccagaatcgggttttattgtcggttcgaccgccgcgattgtctcgaatatgtttttgggacaagggccatggaccccatggcaaatgttttgctggggcatgatgggcgttacggcaggcttaattagtcgccatcagtgggcacagaataaatacttgctctgtatttttgggtttgtctggggctttatttttgggtggattatgaatctgtggtattttgtcgcatacgtcaatccactgacgattaagacttttattgcagcctatgtcgcgagtttctattttgacttggcccatgctttatcaaatgttttttttattttcttcttttatcagtcgtggtaccgaatcatcagtcgctttaaagtgaagtatggtttgttggcgacggaagatgagctataaaattgagccctcaccaaagtggtggggctttttttaacggacatcatttcatacttgaaagttcacaatttggtcccaactgcttggtattctataaatatcagataagcatctcccaagtaagtgaatctgagcaagttaattttatgagacaattcctccctaaagaagtgtcttagcaacacccaatgagttgtagtttaacggtagaaccaatcatctaaattgaaattcctcccaagaaaatcaaaagcgattggctattaaaagcgaagcgtaaaatgaatgattgatgtgggttcaatccccgcaactcgatgactgttgtgttaaaaaagccgcaaccaatttggttgcggcttttttgcgtttagtagaccaatccctgtttaccagtcgtatggccagttaacagtttatcagtaatcatttggagattagcgaccgttaagcctgtgtagtgggcggtggtgattggatgcagaatccgcgcatcgattagccgcgcaatttgttggagaatcgccccttgactagtggtttggaattgatagtccgttttagtgaacatgtactcaaatgaaaatgaggctgatttaggcttaagcagtgcgagatcaagtggatgcgtattgctaacaatcgtaccgacttgtccaaacggtttaatcagccgtgcgacctcttggagatagctttcaatatcataaaggaccgcgatggcatcaaaggtgttatccggaagactggctaagttgtctaagctgctaggtgaatgataatccagcgggtgatcaactccgtttgtttttagccagtcgaaatgagtgagactgcttgtggcagtgacggtgaatccggcccacttggcgagttgactgagaattgatccaaccccaccggcaccattgataatcaatagttgtttgccacgattggcattttgttcagcggtaaaaccaagcttttcaaaaagtaattcataggcggttaacgaaacaagcggtaagccggcaatctccgcggcactgattgtactaggcgcaagcgcacaaatcgcggccggaacacattgatagtgttggaaactgccatcgatctgggtactgccggcatagaagacaacatcgccaggttgaaagttggtcacagtggcgccgaccgcttgcacggtaccatacccgtcatagcctaaaatggttgtggtgctagctcgtcttttaaggtcgacagggttgacgctacttgccctgactttgatcagtagctcttcaggtttaggcgtagggatttcaccagacactgcgtgccaattatgttcggtatcaagttggatttggtgattagtggtcatgatgacgtcatcctttctgaataaaatggttagtctaagcctactgctaatcaccgcataatacaaaaaaagacgcccaattaagaacgtcttgagttcatttaaattgcttcaacagtaacttcttcagttggttcatctgcagaagttgtctgtaaaaattgatcgcctgcaagatctttgtagaatgccatataagttgcattcttatatggcgttaaccagaaatagccaatgccaagtgagaggccagctaaaatatcccaacctaagaagcttagttgtaagacgaaaaaccggaatttatgcccattcattaactcacgactcttagtgatacaatctaaaaagctaacgtcagcttgtggatcgttatctgttaagtccttgaagatataagaagcttgagaataagcgtagcctttaatgatccccggaataatgaataacaatgcccaaaggaatgtaaataagctagctaaaattcgaattagaaaagcgcccaagaaataacgttttgagaagacactgaaagctcctttgagtgaactaaaatcagcatctttcgaacggagccaatctaagaaagtaaaattaatcccaagtgtaatgagccccaaaatgaaacttggaatttgaccagtaaaactactaccagacgaatggcccgaaaaagattcattggcagccattgatgggtcggtgtttgcgaagatggcaatcatggccatcaagactgctccgacaataatcaccccaataattgatagcagagtggggatgatgttcaacgtaacggcctttccccaatgaccagcaaataatgacttaacttcttttttaagtgaagcgcgtgattgatactctctttccatgataattcctcccttactacgtagataaattatactattaattaatggctgaaatcaatttatttttaagtatctttgaaaggattgttggggattagttgttgaatgcactggtacatcaggcattctataaataatagcacatcataattaaatagtgtaaaatataaaattagctattttggttaaggggatgtatagaatgaataagggtcgattagaagcatttagcgatgctgtcatcgcgattattgtcaccattatgatcttggaatttaaaacgccagaaacaccggaaattaaggcacttttggaaaatggtccctacttttttgcgtatatcattacgtacgttttcgtaggggttgcttggtataatcattactatatgttttcgctgacgaaacgaggaacaaagcgtatttattggctgaataatatttggttattatccatgtcatttttacccgttgcaacggcttggacggggcggttcatcaatgaacgcggtccggaatatttttactacgtggttcacctgatttggttattagcctacttcttcttgagtgatgcattagcgaacgccaatcgtgaagtcgcccctgagcggtatcaaaaaattaaagccatgccgatctatagcacgattactaaaccttatttctgggtgattcaagtgattctattagtcgctatttatttcttcccacccatcgaattaattttcgtaatggtcgaaatttatacgattgggaatcgtaccgacaaagaaagtgatcaattattcaatgattaaaaaaacaccgctagcctattaggttagcggtgttttttgggagatctagaatttaataacaactttcccggttgagtgattcgtagcacttagttgatgggctttgatcaagccatcagcagaaaatgggaagacagtatcgataattgatttgactttaccatcggccattaatgcggcaatctttttaagttgatcaccatcaggcattaaccagatggctttgaaagtcatattggtatctttaatgatggccgcagtttcaggcgcttcaccaacgattgaaatttggcgacctgtttcaggattgaggacagcccatgcatcgacttgtccttgacccccgatagtgtcgataacgagatcgacattgtgggctttatcggccactttttcagttcgatagtcaatgatttcatcagcgccaagttcacggacaagatcgaagttcttcgcactagttgtggtgataacgtgggcgcccattgcttttgcgaattggatagcatatgaacctacgccacctgaaccagcttggaccaggacggtttcgcctggttgtaggtgaccgtggttaaagagtgcttgccaagcagtttcgccagctaatgggacggcagccgcttcttcaaaagtgacattggctggttttggtgcgattaagttgtcatcaacggcaacgtattcagcataagtaccacgatttgaagtggcaggtcgtgcgaaaacttcatcaccaacgtgccattctgttacggctgatccaacggcaacaacgaccccggaaaggtcccagccaagaacgattgggaattcccattggaacatgcttgtgagatgaccttcacgtaatttccagtcgagtgggttgattgctgtcgctttagattgaattaggacttggtgttcaccaattgtaggcattggtaaagtaatcatttcaagttggttttcgtcaccatattgttggatggcaatagcgtgcattgtttctgacatatgaatagcctcattttcttattattagtaagtgtagtgtaccaatcaaatggttgttaagtcaattaacaggcttaaaaagtaaaagaaaagcacccaatttggttaattggatgctcagaaaataatgctgttaatcctcaaagtctaacccgtttgagtcagcactctatagttcttcttctgctatttttgctagtgttgtttttgatgggatgaagaatagggcaccagttgttggttcactgaagtcgagtaggtggtcataattgccggctggtttgccgacgaacatgttggttaacatgcgttttgtcactgaccatgttcgagaatagccgataaagtaagtaccggtcattttttcgccagggtttgcgtatggaacgttcatgcgaacaatcttatgttccacaccgccttcgttatcttgtgagacaacgttgtgcgcgttggttggcttttcggcgtcagcaagttctaagtcagaaaactttttgcggccaattgttttttcttgttcttcagttgaagtatggttccagctgtccatggcatggatatatttctgtgcaaaagcgtatgaaccgttgatgaattctggatcttcatcgccgactaatgcgtattcagcagtttcatcgatagcgggattttccgtaccgtcaatgaagccgatgatcgcgcggccttcgaagtaacggaatccgtgtgtttcatcaatcgttgttgcgttatcagaaatgaattgcatcatttgatctaatacttcataacaaaccgccatttctttggcccgaatatggaagaaaagatcgcctccggttgcgacggcatcatgtttagggcttggaattgccttgaagggttccaattcctttggttttggtgcgttagggaataagtaatcccaagcatccgagccaatcccgaaagccacgcgtaagtgggcatctgggtaacggatattcatgctattgatgatcgctggaatgcgcgctgctaattcggtaacagccgctttgtccgcctcggcatcttgccgattcaatttctgggtgacgaaaatgatgttctcgccagcatctttaaaaacgtcttgtgcatctgtgggtgtaattgccatgttcagaacctccaaataaaaatttaaagttagttatttataatcattattatctagctcagtgcaagcataccaaaaaatggttttttttaccagtcccaataattaaaaaaagacatattatttgtaacgcttacattttaagcggtatacttaagtaagtgaaacataaaatcatcaggaggtctttattaatggtagcacagaaaataaacgcatcagatgcaatgttaaaagtcatggcagactggggaattgaccatatttttggtttacccggtggctcgtttgattcaacgatgaatgcactacataaccagaaagcgattatgcgttacattcaagtgcgccatgaagaagtcggtgcactagcagcggcgggtgaagccaaagcgactggcaagattgctgctacatttggctcagccggacctggtgcagtccacttgttaaatggtctctacgatgctaaatatgataatgttcctgtattagcattagttggacaagttgctacgggtgtgatgaatacggattatttccaagaaatgaatgaaaaccccatgtttgctgatgtggcagtctataatcggacggtaatgacggctgaacagatgccacttgtagtcgaccaagccattcaacaagcctataaacaccgcggcgtagcagttgtcacgattccaactaacctaggctgggaaccgattgaagataacttcgaggccactgcaaacttattccaaatgggcaattatccagagccaagaagcgtggatattgatcgtacattacagttaattaaagatgcaaaacaacccattatttattttggtcagggtgcacgtgctgcgggtgaagaattggttgctttatctgatcggttgagtatcccaatgatgtcatcagccctttcaaaagggattgttgccgatgaccatccagcttatatggtttcagctgggcgagtagccacgaaacccggagttgatttggcagaagctgctgatctaatcttatttgtcggtagcaattatgaattcggtcaatacttcttcaagccagatgccaaatttattcaaattgatatcgatcctactaaactaggacacagacaccatgtggatgtcggaattttagcggatgctaagacggcattaaaggcattgctagccgcgagtgaaccagttgccaaaaaatctgccttttataaagcagcactcgccaacaaagaaaactggaatgaatggaaagccagttttgaagaaaacgatcaaacaccgttacgtgtggaacccgtcttcaaacaaatcaatgagatggccactgacgatgccatctttaatctcgatgttgggaatgtttcaatcgatggggtgcgtttcttgaaaatgcatccaggccaacgtatgacgttatcagcatggtatgccacaatgggttgcgcagtgcctgcagcaatcgggacccaggctgcctaccctgaccgtcaaatctggtcgattagtggtgacggtggcttcacgatggtgatgcaagatattatcacgcaagttaaataccaaatgccaatcatcaacgttgtattaagcaacgattcattcggattcattgaagctgaacaagatgataagggtcaaccacactcaggggttgccattcaaggggcagattacggtgcagcagcaacagcgatgggcgcaaaaggatttacggtacggacattagctgaattgaaagctgcttttgctgctgctaaaggcacgaaggaacctgttgtgattgatgttaaaattgctaacgaacgtccgttacccgttgaacaactcgtgattgatgatcaaacacaggatccagcagaagtagcggcctttgttgaaaaatatcatgcacaaggattgaaaccatttcggacgttcttagaaagttaagcttttttaaatcagactagcgaccgataaaaaataatgttgaatgtggtaaattataattaaaattaaccttggaaggaattcagcggatgagtagaacaatttcaagacgcttaatcagcgcaacgtctctcatggcattaatcggaagcatctcattggctatttattggtctcggcttggtctttttaataacacgaccgcgttgcaggcgtatttggggcactctgtgctaattggtccgctgattttcatcacgattcagattattcaagttgtgattcctgtcattccaggcgggattagcaccgcagccggggttttggtattcggcccactttgggggtttgtttataattacgtcgggattgcaattggttctatcttgaacttcttattagcacgacaatttgggaagccgttcatcttacacgtcatcagtgaaaaaacgtatgacaagtatatcgggacaattatggaaaagaaaaactttgtgcgcttcttcgcacttgcgattttcttaccggtcgcaccagacgatgtcttatgcttgatggctgggctcaccgagatgtcattgaagaaatttacatggatcattattttatgcaagccagcttcaattgcagtgtatagttttgcgctggtgtatggcggtcaattcctaatgcaattaatgtaaaaaaaggcccaggatattttatcctgggccttttttgcgtgtttaggcggtttttctctttaacccgatgccagtaacggcactgagaattgagaagattggtgataagagactgaagaaacaaaatggaaggtaactcaaggtagggacgcctaaagtattagcggcaaaaacgccagcgacgccccatggaacgaggtagttgataactgtcccaccatcttcaagggcgcgccctaaagcaagattactcaagtttgatttttcaaaggtgctcttgaaggctttaccagggagaatcacagaaaggaattcttcaccgataaagaggttaacgccaatcccagaagcaataacggcgctgagcaattgacctggcgtcttaagatgggtagcaagaggggccatcacgcgttcgattaaaccaagcttcattaagaggccaccgagggttaaggttaagataattaaggcgacggtgcttaacatgctattaatcccaccgcgtgagagcaaggcatcgatacttttatcgccggtgtgggcaacaaacccattttcaatgtaactcgcaattttagcaattggtgtgtgtgggttgtggaaaaagattaaaccgattgaaacggcaatgtttaaaaagagtgttggaattgctggcattttaaggcgagcacaaacgaaaattaagatgattggaattagtgcaagtaggctaactgaagtgtgcgtgtttaagacagcaaccgtcgcaccaattttatcgagggagacatttttcgaggtgtggccaatgatagcgtataaaattaatgagccaacaaacgctggaaccgtggtccacatcaagttcttaatatgttcaaatagatctgtttcagtaaccgctgcggttaagtttgttgattgtgaaagtggcgatgacttatcaccgaatattgccccggaaataatagctgcggccacgatggtagtgtttagtccgagtgtggctccaatcccgaagaaagcaatgccgacggttgaaatgacggtaaaggcgctcccgatggcactgccgacaagcgcacagacgacgaaaatcgagggaatgaaccagtgtacactgaccattttgaagccccagaccatcaggctaggaatcacaccggcggcaatccagatactgattaaggcgccgacgagaatgaaaataatgataggaatgattccgcttttgagaccatcttcgataccagaatgaatggcgtcccagctaaagtgccgccaacgggcccatagaatcaagagggcaatcgccgttaagacgggtgtttgtggtgaaagttggaaaacaatcacgccgctacccatgatggctagcagaataagtaaaacgatacttgcttctaataaactggttttgtgttttgtcatttaaatcgcatccttttaagtttaatggttaggctggtgcgacaaaagactgataacggaggatccccccgcacgatgcaatcttgaacatgaaaatccctccatagttgaaatgtgtttttgattggcaatgttctatgcaaatgtttagatattaagcgctaaattacgcactctacaaaaaaagtccctactcgctgatgcgaatagggacgattggaaaccgcggtaccacccagttaacgtgtcattttaaggtaacacaccactcttacaggtgataacggtcctgttaattagccgaatcatccattcagtatttcgtaacaattaccctgatcggttcgcagcaaccaccgactttctgacacccagataatgcactacttagtttgaattaagatgacttatgattgttattcaatttacggtagttcgaattaaaagtcaagcatgaactttagaaaaaatttgtatcttgcaaattgtaactgtaatctaactggtaagaatcgcttggtaatgggacagtttcagcaaaacgctgctcgaattcgtcgaggggcaagcttgtccacagacgaaaactgtgatcatcataagcggcccaatcacaaattttagttaattcgggataccgttgtaaatcaggaacaggtgtctcaataaagtgtaaaaaataatcataggattcggcttgttgagaaacggtcgaaaataaatggaaataatcgcggaatgtcatcggtatgctcgctttctacaagagtaattaatcgttattagtataaactgaaaaagtggtataccataactttggcgcttttgtttaatggaaacataagaatttacttggcgcaacactgtaagtgggttactatgagtgttgatatgacaaaggagttgttccagatgcagattaggactgccacaactgaactacggcattttcaaccaatggatcttgaagtggtctatcaaattggttgtcaaaaaaagattgtgacgcagctaaatatgacggcttttcaatctcaacaagaagcacagtcgtttctaacaatgttgatgaatgatgaggatgcttgggcgattgttgatcgcacaacgcaggtggtgcaaggattgataatgctcgcccctacccttagtgcggatggacaatcagtcgcggcatatgaactcagttttgccatcttaccggcatatcaacgacgtgggattatcagcgcagtattgccggcaacgatgcaagcctatgcgcaagaaactggtgtaaacacctttaatgcggcctgctttttaaccaaccaagcatcgcaagcgagtttacagaaagttcagttcgagaagacttatcaatcacaactaccggattatttaggcgggcaacgagttcagtactaccgccgaatagtgaacgttttcaaattgtaaaaataacatggttataaccgtaataaatcacggtttaaatgagaaagctatggtataatcggtttgaaagacaaatgggggttaatcaaatggcaaacgaaaacgaccaagcctacgcacggaagttagcgcaaattgaggcaaacgaaaatttgacgattctatcaagtatgaaccaggttaatgatgaaaaggttaagcagtacatcgtctatacagactatcgcgaaaatggtcaacaagaatcgacaagttcgatttttgtctacacaccatacgctaacgtcgaccgctttggacattcaacggttgattttcaaacacaactcttatttgaaaccaataaatggaaaaaagaaatgcacattacagttcttgaaacattgggagcagcttcacgcttagctgtttatgatttccaaaatcttggtttagcacaattggcagtgaaagccttctgtaatttagcgaataagttggaaattgaaacaattgatggtaatatcagtacgttcgatagagatgattttaagaaagttgcacacattcttgaaaaatatgggtttgaggtacaaaccgacgcaggtcaatcctctggttcattcattaagacgcgaaaggcgtagtgcgcgactgttaaaaaggggatagggctaatgcatttaacacgggcgtttgaacaagcaacttgtattatcgtacttttggcgacgcaagatcctgaacacacaatttcgtctgaagtcattcatcatcgcttaggcgggtcacagacttacctacgcaaaattattcgtaagttagtagtggctgggctagtgaaatcggcttctggtaatagtggtggttttacactagcgcggccagccgatgaagtttcaatctacgatgttgtgttggccacggaaggacaaattaagtcttatccagatacgggtaagttggatacggtcttcaatgacttccaacccgttgctaaacaaggaacattgattattaacgctgcgttccacaaggcggacatgctatgggcgaacgagttaaaacggcaaactgtttctggcttgattattgagacaattgggcatcaagccattccagtgattgattggaatcaatcagccgaacagcgtgaattactcatccagaagatcattaaaaatttaaaatagagtgaaagcaatccggttgttggattgctttttttgtgctgaaattgaaaattagttttcaattgattagttgatagtttcagaaaattgagaatttatttaaaaaatggacaatggcatatccaattaacgccgtaccacttgttaacaaaggattaagattaatagtgaagaaaataattaacaccaaaattaaaaatatatatttgctgaaaacttattattttattacataaaacgtactctgaattagaaggagtagcgaatagaatgagacgaatgaagcaacgatttggattgttattagcggtggttgccacttttggcctgatgttgatggttagtcatcaaccagttcaggcggagaaagtgacttattcggttacgcccgtctatcctgataatcaaacggatacggagttgggctattatgatttaaaagttactcctggtcgaaaacaagaagttggtgtgcgggttcaaaatagtggaacgaaaccaattacggtcgatgtgacccctacgacagcgacaaccaatgaaaatggattgattgattatacaggaaccaatactaagcgagatagctcgttaaagtattcgtttagtgatatgatgtcgggcgcgcaacgggtaaaggtaccggctaacggtgaacagacggtgactttcgatttaacagtgccaaatgaatcatttaaagggctggttttaggtggcttttatatttcacaagtccctaagagtcaggttgatcaggcgttggaacgaaaaggtggggctactttaaccaaccaatatgcctacattcttgcagctaaactgactgaatcagatgaaatggtgcatcctagtctacggctgaataaggtgaaagcaggattgttcaatagtcatactgccgttttagccaatgttcagaacgtcaaagccaattcagtcggtaagatggctgttaaaggtgaaatccgcaaagttgggtcaaacaaggttctgtatcagaacaaacgcagcgacttagagatggcccctaattcaaactttaattacgggattgatttaaagaatcaaccattaaaagccggtaaatataatattaagttacgcgtaacatcgaataaggggagttggctactttctaaaaacttcgagattacccgtcaggaagttgcaaaatataacgataaggccgttgaattaccagagaacaataactggtggttatatgtcattatcggtattatgattgtcattatcctactattgataattcttttatggcggaaatcacgcaaagataaagaacaataagcaaaatgaaaaccacgattgaaataatcgtggttttttaatggaaataattgacgtggttgtgtgaattctgtatacttatttctaacaagataagaggtcgcaaaaaccatgagtcgttaccctgaactgactaagcagtaatgagggataattaaaggggaatttgccgaaatgtcaatttgcttattcattttgatgttgggacttggttgaataaatcaaggactgtcgtaacgaaatgttacggggcgctatcaacggatattataaggctatcagtctttttgtcgtttttagcagacaaaaagactgtttttttgtttgctagaacgtggttggggctttttcttgaaatcatagagaaaagagcgaagtattatggcaggaaatgaaatgaagcgggagttaaagacgcggcatctttcgatgattgcgttgggcggtagtatcgggacgggcttgtttgtgacaagtggttcagcaattgcaaaggcaggtccaggtggtgcattgttagcctattgtgggattgggattatggtcttcttcttgatgaccagtttgggtgaaatggcaacgtacttgcctgtctcaggttctttctcaacctatgcaacgcggtttgttgatccagcccttggttttgcgttagggtggaattattggtttaactgggcgattacgttggcggttgatattagtaccgcggcactcgttacggaattctggcttcctgatatgccagggtggatttttagcttagtcgcactattattaattttcttgattaacatcacgagtgttaaatcattcggcgaaacggaatattggtttgcgttaatcaaagtgattacggtcattattttcttaggtgttgggttactaacgattctcgggattatgggtggccatcatactggcttgagtaacttcacttataagaaggccccatttgttggtgggttaccaatgatgttgagtgtcttcgtcattgctggcttctcattccaaggcaccgaactaattgggattacagctggtgaatcaaagaccccagaaaagagtattccaaaggccattaaacaagttttctggcgcattctgctattttatattctttcaatcttcgtgattgcttgtttaattccttatgatagccactcattgttgggcgcgagtgaaacgaatattgctgttagtccatttacgttagtgttcaaacgggctgggttagcttctgcagccagcatcatgaacgcagtgatcttaacatcagtgttatcagcggcaaactcagggatgtacgcttcatcccggatgttgtggtcaatggctgaagatggctatgcagctaaaattttcgctaagacaagcaaacgtggcgtcccagtaatggcactgattggtacaacaatcataggagctttaacctttgtgacaagtatttttggaactcggatttatttattcttagtggcagctagtgggttgactgggtttattgcttggttaggaattgctgtgtcacattatcgtttccgtcgtgcgttcaaggcacaaggtcatcagttgagcgaattgaaatatcatgcacgttggttcccatttggtcccatttttgcattcgtgctttgtttattggtgattgcagggcaagatattcaagcctttaagaacttcgattggacagcgattgggattagttatatgagcattccattgtttgtcgtactatatgtttactataaagtacggtacaaaactaagatgattccactagaagaagttgatttatcaaaacataaatagcgtgcggcttacggagcacgtttagattacaaaaaggcccgacaatttaagttgtcgggcctttttgcgttattgtagcgagcgttgatcaccagctttgaaatattgttgataaggtgttaatcgttgcttgaagagctcgttgactgtcacgaaatgtcgtttttgagcggtttgttctttagcaattgcgggtaatgtcttaatcgttgcctcacttgtgtgcagtaggacaagatcaccacctgtaatacgctcatttacatttttggcaattgtcggcgcatcaatatctaagcgccaatcttccgaatcaacactccaagcgattagtgcccggctagcagcggttgttaattccgtactaggggtttcggttgtgacccgtaataagtgtggcaattgaccactggctttgaagtaggcggcatcggtttgcttgaggttatcggcaatttctgacgcgctcattgtatccaagtcatcatcgttgttatacgcttgggtgccaacgacatggccagctttgagtaattgtttcagttgatccggatgttctttagctgctttaccagtagtgaaaaaagttgctttgatgtttaaatcgtttagttgattaatgacactcgtaatagtgctaggttttaatgtcgtattaaaggtgagtgcaatctttttagcaccaccttttttggaaggcatttgattgtcttctgggacaaggttgggattgaggtatggaccaaccgttgccattggcagggcaattgtttcaatatcaagaggattctttgcgaatttcaatgttagaccatctgttgtaaagtcaaaattggttgcttgatcatttcccgggaaatcaagtgcttccaattgtgtaagttgttcgggggtataatcatgggcttgtaattgttggttaattgcaagttgacgaatcatcggaattgttgtgctatctttttgtaaatctttaaacgaaaccgatgttgtattgtgctgcatatcatagatggcttcagtcccagtttgtgaaaacaagcgttgataacgggttttaaaccgtgattttacaaaaccataagcctcggcggttggcttaaaagcatacgtattgtcttgcaagttcttagcagtataactgacgtacaatgtgatatggtcaatgtcgggtgattctttgtgtgcttttgcataaagctgattaccgagtgcgacttcttgtttttgtaaatcgatattggccccattttggttttgtaggacaaaataatagatttttccatgcggtttggctacagcgtagattttaaaggccgcgtactgaccgcttgcttggtcattaaaatcacttaaagttgactgctgcatattcttttgcgactgtttaaactgctctctcataaaatattggttctcaaaatacataatgggtattaagaagagtgtcagaacaatcaaagtccatttttgccaagtccgcatgaatactatcctccagtaagtttgtttatctaaatttagtatactgaatttaatcgcgacttgaaagtattattcgtgaactagtctacataacccgggaattattctgcactttgtttaagcgctttgttcttttggtgtagtttgtacatcagatagagaataatcaatagtaatagtaggaaaccgataataatccagatatagagatatgatttcttcggtggattaatcgcatttttagttgttttgtcgatagctgcctgattaatggtgaagtatttatcaaagtgccatacttgtttgccagacttagcagtcattgttaagtggtactttcctggtttcaggggctctttgggtgttacactactattgaaacttgaatttggagccatttcgagatctttgtaatgagccacatattttttaccagagcgattgacgcggtaaacttgcgtatcgatttttaatggggtcatgacccagttactattattatagaggttagctaaaatcgctggttttctgctagcatccaaaccgagggtaacgttgtttaattgtagatcgagttgtggcgttgaagcaggcatcgtacgaacgacgacggggatttccattgcataatgattaatgatttgggcgccttttgtagccgtactttttttcgtatctttcttctcaacgtgtaatgatcccagaatgataccgggagactcggttgaaggtgctgtaattggaatagaaacgtcttgactgctattagcagcaatcgaaacgactttagtttcaccattaagatctgttaaagtggtagttcccttttgggtagttgactgcttgctataaacgacttgccctctatcgtttgtaacaccattgtgtagttcgactgagaattcagaggtttggttgccgctattactgatattaatgacgagattagatgttgtttgtggggcaaccaagacattgtagaagtcggcttctcggatttgttctgcattgtcaactttcttaatagagaagtcagcagagtcagcatgtgctgcaagtggtgtacctagaagtgctaggatgaaaaataataaagagagacggaatgtttttcgcatagtaggtcctttcgaaattgagtgtttcttaaagcgtaaaaaaatcgcagcaaaggatttgccgcgatttttgaaatgcttattttataagttgaagtttgcagcctttgttgttactggtgaaagcgtccaattgacatttaccacaatttggccggcgttattaagaacgccgtttctagcttgtacatcagttaaatcgatacttgttttgtcaggattgatattgattatttgttcatcatagggcgcatctgttgctttagtaaagacatcaacatctgtctttggtaaaatttctttatcattaattgttagtgtcgcagtatcatgttctgtatgggcagtaattttccaatttttttgagcagcagttgtatcattaacaactaccttggcatctggattagcggcgctattttcagataatgtcttatggatacttgtgttagcgtattgaacatcaccgaagttaaggttactgatttgggagagtttaacagaaccatcttcaatatttaaagttcctgttgatgaagatttaagtgtatctggtgtatctgcgtgtgttggtgttgcttgagctaaactcacagcacttaatagtgtagcggatgaaacagtaaagattttaataaatttattcaaggtaaatccttctttcgttaaaattaatatcaatgaatgtatattaacatattgaactaagaaggtaaagtataataattatcatgattaatttattatgcattgtattgatatgagatataatgtaatatagggatttgttaaaggcgtgtaaatttaattaggggtaaaatagtgagaaaaagaacatctgttatcgttaaaataatttttttaatcggtttactgacaatgagtacaccgctaaacgaaagtaaagctgagtctaaccaaacggcgacggttaaaatgggtaatcggacggttgaacgaccaagcaaacgctatccactcggggtggcaagtgatgcaacgatgtttgcgggtaaaaacatgattttaaatccgaacagcgtgggtgatagctatggtgaattctatgctggacattttttggtgggttcatcaataaatgatactgaggatacgaatatgtatccgaatataacgcttaatcatttcgaaggtacagatattgatttaccttctaatttagatccatcaatagtatcagcttcggctttttctgatgctatggtaaaagttattagcaattcgaagagcttgattaatattgatgggagtcctttacattatgtgatgggtgaatcaagtaaggatataatctcagatgaacatttaaaacaaatatttccatgggatagtgaatcaatagatacttttaagaaacgtgctgaaaaagatacctatttaggtaatattggttactttaaggaaaataaggttagcactgatgagcaagcaattagcaatgttacgaacgtgagtgattattacgccaacttaaccgctactgaatatgatgctgatggcaatattactggctacaaacaatctatctattctgacgcaattaaatcagttggactaaatagtaagacagttagtgggggcggattgaacagtcatataccaggtgatgtgatacaggttaatgtcgatatgaatacggcaagtaataagactggcgttgcagtggtcgatattgatggtgcggcaaatgatggtgtatttcagaaggcgactgggatttccattaatcttttgaatttcacacaagggaagcaaaaagttccgtatatcatttttaattttcataattttaagagttttaatttcgaaaatagttcgacttacagtatgagtgcgtatacaccagcacaagttcaagcgcaagctccggataataataaatattatccgcaggattatgcttcttatgaaaaacgtttgaatttaacgcctgcagatgacaactcggctcgatataagacggcttcccacgtattgaataattttaatacgcttagcggaaatggagatgctgcgattacgttaaattctaataggtcgaatgaagatagttactcatttattggaacggttttggcgcctcatacaaatattatcgtagaaggtgatcaccgatatagttttgctgggaatattattacgaataatgatatctacttagatggacaagtagatcttgataaagccttcggcgctaacttcaatagtgatgggggatttcccggcaccagtgatttagagcccaccaccaaagtgccacgaattccttctgttgatttgccgaacagcgttagctttagtcctgaaaatgcaacaacgaattatgtttttgaatattcactgaacaacaacacggcaattgatccgccatcatcaacgatgcatcaattggatgggcgtgcttttagtaatacgttcaaaattgatgaaccggcgggaaccgataatgtgttatggtatcagatgaatggtaagaaatggaaagcgtataaaccagacggtaataatccgttacaacctaatacaactagtgaaaataagacggtcgaattatccattgcggatgtgacggaggatcttaaaactaatgatgacagtgattatgatgatcggactgtttataatggcggcgagatttcaggagactatgaagtgaaggatgatcttaatcctgataaaaccatcaaaaaagcctttatggggtggcatttactgcataagaataaattttcattcgttgtagcgagcgcgagtgatgatttagcgacaatgtctgcggatcagattaaggcaaagtatgataataccatcgttaactacacgttaaatgttcacggggatttattggttaactatccgaaggtttttgaatttggaacctatcagttagggacatccgggaaaaatccggaaagcattgctaagggacaaattaatgttgaaaatccgttctctatgaactggcgagtggtcgttaagaatacaacgtctggtcaggatgcgattgacaatccattactacaaagtcatgcgacagattttaatgtacagttatattcattaaagactggaacggatgatacgtgggagccgggagacatgcttaatttaggtgacttgttgaaaggccctgaagtgccattgttaacgctggatactgaacatacaccaactggtgatcaacaattagacaaaattcaaccgactaaaacaatgccgttttataagagtgatgttaatttgaaattccataatgcaaaagcggatcagtttgtgaagcgcactggtgaatttaacatcgatgcaacttgggaattatcgacatcagatccaattgtcccgaatggcaaataatgattagtcttggtacggtaacgatgaggtgcgcaagaataatataaataaatattaaaaataagaaaacatttacggggtgcaccaaatccaatcgagaataaataaaaaaagtttattttataccgattttaattgaatcatagctaatgcttatgaatcaacgttcaaacaatagaccaattttaaaaatatgatgaattaaaataagaagtgttcaaaaattgcgtagtacagcaagttttgaacacttcttatttttgcaatattattggacggttcaaaaagctttaagtatatcacacaacttatcgtctgtcaacaactatttttaattaattattacttagaagttataactccttaagcaacatataatatgttatcacgataagatttaaataacaagcgttttttaaaatcttttttatttcgtatcgctgagtcatcaaccatacgtccctcgtcgagacaacttttatatattaccaagattaacaggcgcggtcaagctttttattaaaaaagctttgaaaagttaccagcaacgtttcatcgttaccaataacccttcaaagctctacggtatccctattgtttaatgagtgattcaacatccaaaatcttatcaatccagtcaccttgatagaagtcttcttcatgagtaacaaggagtacgccaccctcgaaggcttggattgcttttcgtagtgcattcttcgtatcatcatctaaatggttcgttggttcatctaatagaagaaagttgcttgatgttaatagtagttcggcaatcttcaccttcgattgttcgccaccactaagttgtttcaaaggcttcatcgcttcttcggcagttaaaccagtccgcgataaaacttggcgtagttccttttgtttctgatcagggtattcgccttgtagatactgtaatggcgttaccatattattcggccacttcaagtcttgtttaaagtaaccaaacttcaccgtactggcaatctcaaagtccccatcgattgctggaatttctttaatgatcgttttaatcaacgttgatttcccaatcccattaaaacctttcaagaccaccttctgatcacgaccaattgaaaagttcaacgctggtagtaacgcgcgatcgtaaccaatctccaaatcattagtcgtcaatagaatctgactggccgttgcatgatatggaaagcggaagttagccttcacgcgattacttggtggcgtcaaaatatccatatgtgccaattgtttctcacgactcttggcaattgtcgaacgggagcccgctttatacttgcggatataagctttcgttttttcaatctttttttgttggttctcataagcctttagataactagccttattctcttccttttgccggaaggcttgttgtagtgtgccggtatacttcgtaatcttaccgaattcgatatcggcgatacaggttgtcacccgttccaaaaagtcataatcatgggagattgtgataaaggcgccttcgaaatgattgagataatcactcagccaatcaatgtggttcgtgtccaaatagttcgttggttcatccagtaataacatatcgggttcttctaatagtagtttcgctaaaataatcttcgaacgttggcccccacttagttgtgatacatcatggtccatccctaatgcatcaatccccaagccagtggccacttgcataacgcgcgtatcaatatcatagaagctttttgcctctaatagttcttgaatcgcacccgctttttcgagcaattggtcatcaaggctctctgcatagtccgcataatattgactcattaatttttctttcttatataaatccgcaaaagccgtcttcaaaaattcaaagatcgataatcctggtgctaacttcgcatactgatcgagataaccaatcttcaaattcttttgccacgtcacttttccttcatccggaagaatgacgcccgtgaggatattgattaacgtactcttacccaccccgttttggccggtaatccccatatgttcgcctttattcacttgaaacccggcgtcgtcataaagttgtttatctaaaaactgttgtgttaggccttcgacttttaaaatactcattgttttattcctactttctttccaaataaaaaacaggggcagcatccgctacccctgtcatgattacaatcattgactatcgaccactccatccatagtcactacccaaataaaccactgtcaccagtcgttaaatccagtaatgtcctatagatgacttttaatcaatattaggctctgcacgatgcgtcatcttcaaatatacagagcgaagcttcataattaatggtcgttcaattaacatgtaatcgcacccttcaataagttagtcctatcctaacatagaacaatcgtccatgcaaaagccttagctaacccgtgcacgcaacttcgctaacagctgtgcgcgtttgcgccgagaaatgattagacgcaattcaccgcggacaattggataatccttagccctaccatgcatcattgtcgctaagtcttggcttgttaatccttgattagccacttcaattttgatcatttctgctaagtacgtactatagaatgcattaaacccgacatataagcctagtactgcactgattagaatcgcaagccataaattgaaattcaaaatcgtctttaaaactaacatgccacaaataaacgcaatgaccgtggccactatccctaatatgattgtatgtcttggggcgtctttcatctgctccaccttcttaataatgattaatcgtttatatttcatttatattatacctaattttagccgcaataagcagtaaaatcacttaattcttcaaattaaaaaccgctaacgtcaagcgagacagtcaaccacgtttactagaatgagaggctatgtattgtaaaaattgtgtatatattgtaaatttttctgtttttatccccgtaaacagtctagaattgtagtagtgcttttttgaataatataactatattaagaaggataattgaatctatatgaaaaacattgctttgaacatccgagattttttcttagatgacaaactactcttagccgctgccatcgcagccattgtcacctcatttttcaaccgcccacaacttagttacgttaatttccacgtgatcgtcagcgtcttttgtattatgacgctcgttcaagtttatcaacggctccacgtgcttgattacttcgctcgcgagttaattatcaaaagccgttccaaacgagccttgatgcagatgttattagcactaacgtttgtcggcgcgatgttcttaaccaacgatatgacggtattaacgttcgtcccgttattcatcttaattgcgcgtcaacttgaattttcaccaatcttaccggtgacgctcatcacgatttcggctaacctcggttcttcattaacaccgtttgggagcccgcataatattttccttgtttcgttttaccatatgacgattcgccatttcttcgaatattcaattcccgtcttgattgtcagcgtcattatgttggcagcaacgaccttcctcttcccaaaagaacccatcaaacttcacgggttacatcccgttgaagttgaaaaagggccactgtggtatttcgttccattaacggttgtcgttttcctcgcagtgttctcattaattccattatgggtgacaccaattctagtgattatcgcgattctagcgtttgatcctaagttattcaaaacagtcgattacggcttattactcacattcttctgtttcttcatcgctgttgggaatttaagtcacatcccaacgattgccacattcatgcgatcaattgtcggaacagcaaaacaaacctacatcaccgggattatcagttgtcaattgattgcaaatgtcccaactgaaattttactttcaagcttcactaaccacagccacgcaatgttcttagccatcaatatcggtggggtcggcacaatgtttgcctcacttgcaaacttgattgcttacaaacgatttaagaaaggctggggcaaagaccttggtaagttccttgtcgttttcactggcatgaacttcttattcttaatcattttaggggtattcggctattttctcatctaattcttaaaaacagggcaactatctttacgatagttgccctgttttttgtcattttaacagtaatcgtcatgatagcattcccattcgcgtcttactgccgatcaacgccatcgtgacgccctttaattaagttcctaaattttacaaacatatgactaacatgacaaattaccccatttctgtaaagaaactgctatttaattgacatgcagcattgatatactctcctagttccaaaacttacctaggagtgacgctttattatcaaaaacaaaccattcttgttagctatcggccttatattgctgatgctaattacaacgaatatcgcgcgtgccgcattaaccaatgaagcagcaccagaaacgaaccaccctgtccaaaagctgatgtcatctaaagccattgaacaattcacggggcaacctgcccaagcagctgaaacgtcactggtcaaacacgcaactgttctaccaacagacaaacccgttagctgtccgattcatccagatcctgattccgcagaaattaaggaaccaacgcccgcccctgagccagaactagttgcggccccagcacctgccgaaccaaccttaattgacaaagggacattcaaattaaccttttacgatcccgcggtccttggcgcaacaagtatgcccggtggaatgtacgccggagtcgctgcgcacttgggcgttatcccccgcggctcacaaatcaagatcacattaagtaccggtgaagtatggtaccgtgttgtcaacgataccggaaccttcgccgcttctaactcacaacaattggacgtcgcaatgccaaattgtgacatcccctctgccggtgtcttaaatgccaacgtgcagattgtccaacctgcttaattcaaaaaaagccaaccattcagatattacctggatgattggcttttttgatgttcaatttagaaataatcccataacatcggtttcgtatgactaaacgcagcactgagttgagcgatttgctgcggtgtcccttgcacatgcccaaagtgtgcttgactctcaagtgtgcgataccccaacatcgccttagttagattttgaatcgtaacggtgatgtctgcggtccccgttgctaattttgtcacagcagcttgtcctgcatgaatacttaactgccataagccggcattttcaggtaagaaatcatcttgaaccgcaatcgttaccgcagatagttccgctacttgataggcataacgcgcgaagaaatcagctagtgacacaatccgtgccatcatataagggacggttgtcgtctttacgattgtgggatcaggcaataaatcagctagcgactcagtcagtgcactctcatactgaattatcgcataagctgactgatgcttaagaataaagctcaatagctgttcttgacttgcaactgtcgaggtcatcagttcttgaatcacaaacgtctctggttggcgcgtataaatcatataccccgcgacccgtcctgtatcttctcgatagaccgccacttcccaatcactatgcttcataacatcatattgccaccaccaatcagtccgctgcacaccaccgacttgattgtccggatgctgattgaagaacgcatcaatcaacggcaccgcttgcgccaatgtcatccgtactacttgtcctgcactcggtgcaaatttcaatcgtggtaagtcagccgtttgaatttcaaagtgcgtccgatcaaaagtttgttcatagccaaaccgacgatagaagccgtatgaaaatggcgcgagatacgaaagcgtcacaccttctgcacgcatgtgttcaaacgcgagttgcatcaatgctgcaatcccacctttgcccgcaaactcggggtaactcgcgacataaccaatgccactcatcttaaaggtttgcccattgagccgtacgtcaaacggcgtcgctaataagccacttgccaaccggccgtcatcaaaaacgccaaaccctgcactatgtgtatacaactgtttgaagaattcttggcgcttagcactatccggtttattaaacgcatattgtgctaattcataaaatgctggttcatctgtttcaattaactttcttttttcaaccactgcacattcctcctgccatcacttatctttcactataagtgagcgagcaacaagatgcaagcgccacctttgtgattagaccgctttttgcgcataaaaaaaacgaccttttcttgggagtggtcgtttttttatagggagaaatctatgggtattagggagttatttcgttaacgaaattgcacgaagttgttgtgaattcactagaattcgttgcatcaactcgtgaaccgtaaaacgatcagttggtgcatagttcaagattaagatatgcacagtttcttcacatttctcaatgaccttaccgatatacgtcgcagacataatttcgtttgattggccgcgaactaaatcacctacttgaatcgccatgtccagttcacctcgttaatttatttaaccatgacctcattataacgaaaccgctttataaaatcaactatttacttatcgtcataattagtagatgcttgtgattggttaagcagattgcctatttttgaatcttgcgatagtcagcatcgaaataccggccttcttgaatatcttcaatcataccttcataaggcgcttcgctaattacgtcttcgttattttgtcctgcatcacccatataagtgattgtggcaaattcaggcactaacatcttaggatatgtttcatatttttcacgtgattcttccatgagtgcaatgtgatcattttggtaggtcactgtgatttctggatgttcttcaacccatttagggaagaaaatcatgccgtgtaacttgttttcgtttggcatgaagtccaacgcaacatcagtcccagttggttctgtccaagtaatcttgaagacgccgtccgttaacttaacgatgttggcttcttgatcacgaacccaacgacctgcaaccatcccaccatgaattcggtagtcaactgtgtggtcgttctttgcataccattcatactcccaaccattatcgtaagtgtaaatgaaatgcgtccctaagaaatcttctaattctttaaattgttttgtcattttaaaaacctccatatcatgtaattaaatacatgtttttcttaacttgataagagtactgctcaatcctttttttgtcaactttaaaaaagggcaaaaaaaatcgccagcaaatagctgacgatttttcttaattgatttcagttgctaattggcgtttcaccgcgtgtttaagaatcagcggtgccaaaacagtggtaatgataatcacgaaaataatctctgagtaataaagttcactcaacaatttagcgttgtacccaatctgcgcgataattaacgccatctcgccccgcgaaatcattgccgcaccaattgtataggctccttgtggcgaattattcatccaacgcgcaccgagaccacttccaattaacttcgagaaaacagctaacacggttaaaatcgtaataaatagaatatgttgattcaagcttgctaagttcatcgataaaccgatgctgacaaagaataccggaataaacacggtatacccgatcggttcaatatggcgattaatttctttcttatacggggtttgcgaaatcgcaatccctgcgaaaaacgcgcccactaccgcactcaattcaacggcctcagcgaaccaaacaaatccaaaacaaatgattaacgatgtaatggcgctcgcatatggtactaacaaacgacgactcaaatgcataacaaatggcacaatccatttcacactaaagtagaccgcaaccatgaataaagcttgcagcaataaactcaaccctaaactcatgtgggttgaactagctgcagccagttgcgccccaaaaagactggtcaagacactcaagataattacggccagtaagtcatccactaccgcagcacctagtataatcgtcccttctttactttctaacacgtttaattcacgtaaaacttcgactgaaatcgatactgaggtggctgcaaaaatcaccccgatgaataaactctcgagctgactaatgccaaaggccaagctcatcccatacatactgattaccgggacaatcacccctaagacggcgaccactaaacttggtttgaaatacttcttcaacaaggtcaggttactctccaagccagcgatgaacatcaataatacgacaccaatttcggaaaacgtgtggataaaagaattttcatgtaagacaccgaacaacgcgggtccaagaataatccctaccaggagttgcccaatcacagctggcattccaatccgtttgctcatgtgtcctgccaataaagtactgattaaaataattgctaaagttgccattgattcatttccctccataaaaaaagcacgccaaaattcccttctaccaccctaaagaaggaaatcttgaacgcgcaatgcttcaaccgtttttttaacttatgtaataatattaccacaaagccgcactgggcgcaaagtttaaacgttgaattggtaatagtgttcattagattgacatcgctactttttcctgataattttagagtaataactaactggaggtgagtatttttggatgacggctcggacgaagcgttttgtttaattcatcagattattccttattatcggcaagaataacgatcacgaacgaccgcattttgactttcgataattaaaaggagcttaccatgactaaaacacacgcttatcaacaaacattagacgaactgcaaaccaattatgcccaccaagattttgaacaggggctttcgcaaacagaagcggctaaccgcttagcaaccaatggtccgaataaactcgagagccatcacaccccgaagtggcaacttttcgtgcgccaattcaacaacttaatcatctacatcctaatcgtcgcagccctattaacactcatgatgggtcactattcggatgccatcatcatcggtctagtagtcatcattaatgccatcattggttattatcaagaagcgaacgcatctgatgctttggaacgaatcaaagaaatgttggcaaccgaagcaaccgtttatcgtgacggtcagcggatcgacatcccaactgaagacttagtggtcggcgacgttatcttcctagaagctggcgatagtgtaccagcggatttacgaatcgttgatgccgataatctgcgtattcaagaatcagccttaaccggggaagcagactcagttgaaaaaattgcaacacgcttaaccgaagaagaagttgcccttgccgatcaagtcaacatggcctttgcctccacttccgtcactaacgggagcggcttaggcgtggtcgtcgcaaccgccgctgataccgaaatcgggcaaatctcagttgctgtcaccgaaacgaaaacccgcccaaccccattgactcgcgaaatcaacggcttagggaccggcgtttcatttgtcgtcatcggtgcggctgtctttttattcctcttcggcttacttggcgaacattactcactctcagtattagcaatcgcgattgtcacgatggtggtcggttcaattcctgaaggattacccgcaacaatgtccgtaatcctcgcaatgggggtcagcgacatggccaagcacaaacacgccatcgtcaagagcttacctgccgttgaaacgttgggctccgtcgacgtgattgcgaccgacaaaacggggacgctaactaaaaacgaaatgaccgtgaccgaaattatcaccgccgaaacgacttaccaagtcagcgggaatggctatgcgcccgaaggtcagattttattaaatgaccaacctgctgaattggataccaccctcacacaattcttagaggctagttatgaagccaacgatacgacgctttatcaagccgacaatggttggaccattaacggtgaaccaactgacggtgcctttttaaccttatatcataaggttcatggtatcgacgacttaccaacaaatacagaaattgacatgttacctttcgattcggattaccgctacattgctaaactcgtgcaactaactgatggtacgcaccgaatctatatcaaagggtctccagataaattattcccaatggcccaacaggcaatggtcgatttcccaatcgatgactggaatgccgatgtgacccgtttatcagaacaaggcaaacgggttgtggcggtcggttatctcgacgtgccaacaacgactgctacaattacccatgaacaactccaacaagggattcaactcttaggggttgccgggattatcgatccgccacgcgatgaagtcattcaagcgctcgccgaaatgaacgctgctggggtcgatgtcaagatgattaccggtgaccatccactgacggctaaagcaattggtgaaaagttaggcttagcaccaacgattaatgcgattaccgggccggaatgggatcgcttgtcggacgctgaaaaaccaaaagccgctttagaacaccaagtctttgcccgcaccacaccacataacaaactcgaaattgtcgaagccttacaagccagtcgcaaagtcaccgcaatgaccggtgacggtgtcaatgatgcgcccgcattgaagcgcgctgacatcggggttgccatgggaattaaaggaaccgatgttgccaaagattccgcggatatgattttaaccaacgataacttcgcaacaatgtccgtcgcaattcgtgaaggccgccggatttacgataacatcaaaaagagtattctcttcttactcccgacttccttcgcggaaggcttaatcatcgccttcacgattttgatgcaacaagatatgccgttgcaagcgacgcagttactctggattaacatggtctcggcgattacgattcaattcgccttcatcttcgaaccagctgaagatggcttaatgacccgcaagccacgtaagaccggccaagcgctgatgaataaacacgatgttttccaaatggcatatgtttccgtcttgatggccttaatcggcttgttagcctacgattggttactcggccgcggtgtcgatcaagtcacagccagcacaatgatggtcaatatcattgtcatcagcaagattttctacttgttcaatattcggactgcgaaactcgccttttcaaaagctttcttcaccaaccaaaaggcattcggcattatcgcactgatgattattctccaattgatcctgacctacgtgccattcatgcaacaaaccttctacaccgaaccgcttaccttattagaatggggcgtttcgatcggcgcaggcttcttgattctaatcatcacggaattcgataagattatccgtttaatctgggcaaaaagaaaggcatagtaaaagagcgttcttctcgataggatgagaggaatgctcttttttggtgtgcttttcgaaactgacttttccggttaactacaaaatgtgacttatgaccaaacccgtcataagtcacattttgtagttaatcctcaaagtcgacccgcttcaaacgcactctaaacgtgcttcggcaagcatatttctgtacttaaccaaattcacccaatcggcgattacatcgccaattgggcaaatccagttaatgctcaaaatataaccgcttgcctacgcactctataatctactaatcacttcttctacattcttaatctccaccgacattgtgccgtctgggtggttgatgaattcgaatagcgctgggttttggtagacgtcgattgggacgattagttcgatgccgtttgagagtttgagtttttgtttgccgtatttcttttcggcgatttcgcggacggctggtgagattggcgctggtgctgctggcgcattttccgtcatttctgctttgaactcactttgggctgaaacgttgtctttaaaaatcttcgctgccatctggctcgtgtcgatttcaccattggtttcgattgtatcgtagatggcttctttgacgttggcgaccacatcgtgtttggcaacttcgaacttcttgccgattttttcagcggcctttttaacgaccttgacgttttcttctagcgatggcgctggttcgctttcaatcacgttcgttgataaataggtcatcttttcaccggagaaggtgtacttcttctccatcaattcgaagccaaacgtctggaggttaatcgcgaacccctcatccgccttttgggtcttattcgatagaatcgattggtgaatgatcagttgattcatcaatggcccctcttcagcattgacataatgggtgaaggcttgatgataatcgaccttcaaaaaagccaagtaagcttgggcatcttgttcatacaagacaacaaacgcatccgcactcggtgcatcgtcacttttctgatagaccgtgtaccatttttcaacgaggcgttggctagcgccgataaaatcagctgtcgcatcgcgcagaaaagatgcgagctcagcatcttggcgtagcacgccggtcttactctgggcagacgataatttcttaatcttgttggttaaatagtcgcgtgtgttcccattggtgagatctagcacctgttgtgagtaaattggatcgccgagttcgcggtcgaccacttgtaaaattgcttgtttcaaataaatatccattagttaacatcccatctgtctagcgtgtaaagtattgagcgccttcaatcgtgtggaagaaaatcaccgtttcgaccatctcattgttgacgctttttaaaaatggccattcgccttgtaacacacggagtgccgtgcgcggccgtgataattcccgttcaaaattggcctgtacctgaacgggggtgtctttaaaaatatgcgcatcgtataaatagcgcgcatatgccgcaaaaatctgttgggcctgttccgttttaatcgcggcatacacttcacggagtgtctgcagtccatatgtcatcagacttgccaacatcaacgacccatttctagtctcaacacgtttcaaatagcgaattagattaccccagaactggctatacgcctgaatctcatcttttcggagatatggtgctacgtcagtcacaaacgggtaatgccaatttttagcattcaaatagcgcgccgtcccaatgtagaacgtatacggaaagccaaaatagatccgcattaaatctttaatgaaccattcattttcaattgtagcgtaattgtgccccaaaatcgcgtggacttgcatcgctacagctggatcttgcgtattgttgtgcttagtcaatgcgaataattgttgccattttgaagcggataaaagatccggccgataatgctttatttgttttaactgaaccggggcagcattcaaggtatagccaccatcaaacggttcatccaataattggaccgtctgcacaaaatgccccccgagtgagtgacccagtccatagatgattgttgccggattaattcggcgcacccgccggaccacataccgcgtaaaccgccgtgcgagttggagttgctcatcattttcggtattgccaatcagcatcgcatcaatattatacttccaatcttgataactctcacggacataattatccagccgctgcgtaaacgacttaatccgcggatcatccatcgtcccctcagtccccttgtaggaaatgtaggtatacgattggcgattaagcgtgacgtaataggcaactgccgaaaaaccagtttgttccgcattcggcaaaaccgttcgcgcatcatagtgaatcaccgcttccgccgcttgatgcgcatgaataaacacgaggtacttcacgtaatattgcaattcctgcacgttaaaatactgatctaaataattaagagccatcatgtccattttaaaagcgcggctatcaaatggatcggccagtatcggtcctggcttactcgtggccgccactttatcaggggctatatggtataaataggcgagcgcctgcttcgtcagtaccgtactctcattgattttttcattttgtaaattgataatcagttgtttcaaacgattaatcttgcgttggcggttaaattgcggatttgcttgaacggctgccaaactcgccacatccaatgcctgcagtcgccgtaacttggcccacaaatagggatcggctcccgccgtcgccaataattgatttaatagttttattttacttgttttaagttgttgatagctgaattctagtcggttattgcgccgtaataaggcctgcgattgcgcacggtcaaacgtcaacggcacatctaaatgcgctttgaacaataacttacccatgtcatcgaagacttttgccaaccgaaagagcgtcgagatgatcactgtcgtttccatttgcatcattccttatttttgtaatacttctattataaagtatctgactcaaaaaaactgagacgaaatcgtcccagcttagatggttttgggtttgatgcgcacacctggttcaaacgtgctttttggtcgcaacaacttccgcttaagctaaaatcaccagtaactccaaaaacggattactggtgattttgtcttaatgctcatttgctaaccgcgaccaaacgcactctgttcttaaacgtgcttcagcaggcatatttctgtggctaaccaaatttgccaaattagcgattgcgtcgccaattcggcaaatccagttaatcctaaaaatacgaacgcctgcttacgcactctgttctatgcagtaatttttttgtccacagcttggacacactagttgtcttgtctttggcgtgtgccgggcaaagaacattttacttaggcgtggtttgaagaccgtcttgcaattgggacatagatagacagtttcttgatagtagaatgttgtcacataaatggccatcgcaatgatgaccggtatcccaatccacattggccaccaaattccacttagaaacccaagaattaataagccaatttccacaccatcaatcaataagccccacatcagcattcgccgatgtaatctttttaactgtgttgttttagccattgcgtcttctatgtcgctgattgtcatttcaaaaggcaccgcgctagtattttgaatcgattgcagtacaaactgcaacgccactttctggttagctaagtctgtttctttttggactaactgattgagttgttgttcgactagcaatgtcagtgtatccgtcgaagcttgactcgccatcactttttgaattgccttcagtgaaaagcccagctgcttgtagcctagaatgactcttaacgtctgcacttgcgcatccccatacagccgtcgtccattttcagttaagcttgccggcttcaacaaatcggcctgatcgtaatattgcaccgtccgcaccgaaacatcacataatttagcgagttcacctgttgtatattgcgccatagaatatcacctccataccttgatactagccgatgacgtaacgtcacaagcaagtaaaaaagcattatttgctaaaacttttattcgttctcctttaatgcaccaatcatatcaatcccttttaacttgcgatgggtcatccccatcacaatcagtgaaaatagcaccgtcatccctgccgcaatcaggtagccgctagctggaatgatgagtggaaaggccacttgttctgacgaggccatcgtgatgatgaaccaagtcagcaatttaccgattccaaagccaagcacaatcccaacaacggtgaagattacattttctcgcacaatataggccgtcacttctttgtcgaaaaagcccaggactttaattgttgccaattcacgttcccgctctgaaacgttgatgctagtaaggttgaataagacgacaaacgctaaaaccgctgataacccgatgaaaataaaaacgattgggtctaaattagcactagccgttgcttgcttagccccttgatcactgataaacgttgtggccgccacttccgttgtttgttgcaaacgggtcgccaactgtttttcttgcttggtagtcatcttagcggtgcgcacgagataggcattagccgcaactggttgttgtagcgtttttgaaagagcagattggcggagatagacactattaccgagataattttcactgatccctgcaacttgaatgcgagcacgtttcccctgtgccgtttgtagcgttaaccaatcgcctttttgaacagcatatgttttagcgaggttcgcagcaataatcgcaccgtgtttcggcaatgtgagtcgttgttgttctcgcggtgtttgcaaagcgacgtactgtgcaagttttgcttgatcagcgaccgcacagactgtcgccgcttgatccgtaatccctttttgcttgaacttagcctgggtcattgtgaccggtaagtaagaccgaaccttctcagtctgtgttaaaatcgacttcgtttgggctgtactattcggtattttaagcgtcacaattgcttggtaatgggtcaattgcttaaactgacggtcagcaacttcgccaattgacgtctttaaaccaaagcctgcaaccattaaaccggtacacccagcgatgcctaagatggtcagaatcatccgtgctttatagcgaaaaagattacgataagttactttttgatggaaactcaatcgccgccagagcggtgtgattctttctaaccaaatccgttggcctggtttcggcgcttttggtcggagtaattgggtgggcttctcgcgtaaatcgcggattaaaacataccccgtggccccaactgtcgcaatcaagaccgctccagtggctaataaaattggaactgtccaaaaatgggttggataatgcgcaaaggtgtagaccggtttttggattcgatagacgactagcggtaataacttcgtgcccaaaatggtgccaagcacggtgccgatactacctgttagtagcgcatatagtaaatacttctgcgcaatttcccaattacgatagcctagtgccttcaatgtcccgatttccttacgattttcttcgatcatccgcgtaatggttgtaaaggtaattagaatcccgattaagaaaaagaagaccggaaagacattccctatcgcatcgatgcgatccgacaagctcgtaaattcattaaaacccggattagcactgcgcgcagttaataagtactgttgctgcggctgagttgtgtgtgcttttaattggcgcatgagctgtgtttctttagtcgcaatgccggtgcgataagcctgtaaaaagctactgtgacgatccaaatcactaaagcgcaccatcatcaccgaatacggttgaggtgcaaatgccttttgtggcaaatacataaagccatctagctgaccatccccgaccggtacggttccacgttcctgacggtcgatatatagcggtgagtccacataaccgaccactttaaaccggtgcgtcaatagctgctgactcttaaccgtcaccctctgccccagacgataatgcgtcttgaccgcgttatccactaaaatttcattcgttcgttgcggatagcgcccggtagtcagcgttaagcgattttgccgtgcagttggttggtaattatataattgtaagttaacatcccgcgcttcatcgcgatacggaatccgataacccaattcagcttggacaccatgcattttttcgaccaccgcacggtcctgttccgttaagccagcggtcccactaatctgtaaatcggatacgcgttgcatggtgacaaaatgatccacagtctcttctaagttcgggccaatcgatttaatccccacaaacagtaagacacccattaaaataatcaggataatcgcaatgaaccgtccaatcgcctgccgaatatcgcggaatgtggtttgtaaatataaacgtgtctgcatattaaccacctaccattcaatcttttcaactggcaagggattagtgttcacttcaattgaacgcacgcgcgcatcgttaatgtgaatcacgcgatcagccatctgagcaatcgcggcattatgcgtaatcaaaacaacggtccggtgttgttgccgactaacttcttgtaataatttaagaatctgcttgcccgtttcataatcgagtgcgccagttggttcatcacacaagaggagcttcggattcttagcaagcgcccgcgcaatcgccacccgttgttgctccccaccggatagttgggccggaaaattctgaagccgatcctgtagaccaacttgttgcaaaacaagcgcaacatctaaagcattcggcgagacagccgttgccagcgccacattttcttgcgtcgttaaattcggcactaaattgtaaaattggaacacaaacccgacatcagtccggcgaaacgccgtcaattggcgcgcactaaactgcgcaatatcgacaccatcaatcaacacttgcccttcatcgggtgtatccatcccacctaagatgttcagcactgtcgattttcccgcaccactcggtccgagaatcaccgctaactccccttcattgactgtaaaactaatatcatgattggccacgattgttgtctcgcccatctgataccgcttggctacatgtcgtacatcaattaaactcataacgatcactcctatacctatttaaccggttacatttaactagttttattatcgcatatccgagcttgcacgacacaaaaaaaagacaatcagaaaactgattgtcctttaagataagtaccattttttcttaattcaacgtaaagccctgttttttcaaaaaaatcgccactgctggtcgtcgcacttcactaaagaaggccgtattcttggtcgaccaatcagtttgttgctgattggtcccacgattagcataataattttgcatttgttgatcgtattgcactaagttggttgcctgatgcacatcatattgattttgagcgacttgattaacttgcggtaatcgtggtttaacctgatttttagtctttggaatcccgaccgttaacccaaatagtgggacggtataggcgggcaacccgagtagttcagcgacacgcgcaatgtcattgcgaattccaccgatataacagatgcctaaatctaacgattcggcagcgactgccatatcctctgctgcaatggctgtgtcgatcgttgcgactaataaggcttccatattttgtatgccagctaatgactggcccgctttttctaagagtgtggcttgtcggtataagtccgcgacgaaaacatagaacgtccccgtctgtttaacgtacgccgcactttgagaaatcgttgcgatttcatcacgaattacggaatcggtcacttcaatgattgaaaatgcctgaacgaaattcgaagaagacccactttgagctgccgcaatgagttgttgtttcactgtcgtgctgaggggtgttggctcgaaatcacgaactgaaacatggtgttgcatttgttcgattaaagatgacatacaaagactccattcgatttaaaataagttgcttctagcatagcgcgttaacacaaaaagggctagcgcaaaattgccctagcccaaaaacgtgctttttgaaactggctcctgtgcttaactacaaaataagcactatggcaaggaccgccatagtgcttatttttaggttaatgctcagaaccaaaccgtttcaaacgcactttgtttgaaacgtgctttttggttgcaacaacttccgcttaagctaaaatccgcagtactcctaaaacctggattactgcggattttgtcttaatgctcagttgctaaccgcaaccaaacgcactctttaccagtggatttcgttaaaaatctttggccctttgcgcatctttgtccgatcatttttagcaacgtcggtctgttttgatctgccgccaccttttttctgatcaattagtgcttgcattttttctttttgcgttaattttggtgtttgtttttcactcatcttctgactcctaacttttctacattctataagattagcatagaattcaaagaatgcctaaccgttattttgtagggccggaatcaagcgctccgtcacttctcgtacagaaaacgggttttgccccgtaatcaactgaccatcctggacagtaaatggtttgtaaaaccgtttttgcacaaattgcgcgccgttttgagttgccacttcttggtttaaaaatggcaccacttttttcttacccgcaataatttcttctgcagtggtaaacccagtcacttttttaccagcaatcagatactgaccgtcatcatttttaatgcgtagtaaacccgcgatcccgtgacaaacggacgcaagatagccaccgtgattataaatttcccgggcaattgcttgtaattctggattatcaggaaaatcccacatcacgccatggccgcccgtatagtaaatcgcagcgtaatcagctggattgatatcgcttggcttgagcgttgcgactaacccccgttgcacgtaatccggttgttcatagatggtcagaattgattcatccgtgtacttcatcccccgtggatcaagcgggacaaagccgcctttaggactgacaaaatcgtaatcaatccccgctttttgcagttcatcaacgaactctgcggattcccccagccataatccggttggatcggtggttccttgataacgcgtaacattcgtatggacaattagtactttgggcatctggttagcctccctaaaaattagtgatgtgggtttattaaatcgttttgttcttattctgtcaattgaaaaataactacttacgtcgtaacaatccaaatagcgttctgaattgatttttaaatgaaacaacatcattgaagatgtcttcgccgtcgttcaacatcttgaccgttaaccagccgagcgcttcggtaatcgacatcgcaacggtcgcattgaccgcggctccggtgaccgttccaacgaccggtaccagttttagaatgttaccgactgcactccgacctaggccaacgagtaccaattctttcgacaggctcttgcccaaactagccgaccaagattgaccgaatagtttatgcaaacgcgccatcatcgttaattgaaccggcaccaacaagaacgcatcggaaaatggaattggtgaacagccaataatcgctgctgttagtgatgctgcgtgaatgatattgtgtgcctttttacgcatctgatcatccacaccgactaggaagtcttcaaagaccccatcaaactgtgtccgactcttcgccatcgtcttttccgccaatgctttggattggttaaaagacttcgcaatcacagctgccgattgttgcggcaacttctttaagacttccgcaaagaaggaatcaaattccggatttggttcaccattcacttgttgcttattaaaaggtttcttcatcatgccacgctccttatctgattgactaacatcgctactttaaagcgattatataatattgaacaacagttagtctatcgagcgaaaggctgactttttaaagaatctcctgaaccccttcttcaatcgtcgtcaccttaaattctgggaaccgtttcttaaacttgtctgaactgaacaggttatcttcttcatatctaggtaggagttcttttaattcctttagcggtttgctgaaccagctaccgatgttgaactgccacatttttaaaacggtgtagtcgattggttgatgcgttaaggtgcctgctagcgcgatgatttcggcgtatgttttaccgtcatcacaagggaggtgccacgtttgaccaaacgcatccagcgtattgccaatcaacgccatcgcacgactagcatctggcgtccaaattaatgtccgaaccgcttgatcattcaatggcacgcgcacctttttgcccgccttgatattgttaaagaccattgtgttcgtaatgctttgcgtcttgcctgggccataaaattcagatgcacgacaaatgaccgcttcaattgcgccagttgccatcttatcaagtaacaactgtgcgatctccgctcggacaaccgctttgcggccaacgggttcaaaaggactcgcttctgtctggagcgtgctatttttcgcatacatataggtattatcgaaaaagacgagcttggccttgtgcgcgacgcacgcgttaatcacgttagtcatcataatgtgaaattgtgcttcccacatgtctgaattcatcggtaagccagcggtaaaataaacaatttcactgcctgcaaccgcacgatcagtttgggcggcgtcgagcaagtttgctggaaatagttgatcgttcgcgttcactttttttggattccgactgaccagtcgaatgtccgttgtgaagtccttatgaagtgccttggctaactcttggccaatctgaccgctactacctaagatggtttgcattttaaaaactccttttactgttgtttttcgatgactgccgtaatctgatccagcagtgtttttagttgattgatttcgcccagttcgtgttgcaagtaataatagttcttcgtgccttcgcgtctaaagtcgaccaagttggcttccttcaacactttcaaatgatgcgacactgccgggcgcgacaagtccgacgccgccattaaatccgtgacctgtaagccatcacaagctttatcagccatcaattctaaaataatactctgccgcttctcatccccaagcgccgtcaaaaacgggctcagctcagcaaagctctgtttaataaccttcatttcatccatacattaatctccggttttattttaatggttcataagtttaaaccattaaaccattgatgtgaatttttgtcaacaacttcaaatcaatgcaacaaaaaaagcctcactcattaactgagtgaggtcattttattaatgattcccttgtgtaatggttgtaatactccccatatcatatcgatgtcgtgtggttgagtattcaaaaggcagcccgttttgtagaaagactgtctgggtaacttgtaagacaggttcgactggtttgcagtgcaggtattcttgatccatttgattcggttgatcggcactaattcgccggtaagccacgccaatctttagatgcaatgtttgttccaagtattcgtagatcgacttcttaagtactgcgtctgttaattcccctaaaatcttagccggcatgatcgaatgctcaatactatagggtacttcgtttaaaaaccggagtcgaacaacgtcatagaccgcttctgttttagctaactgaagcttttcttgttcttctgcatccggtaatcgcaattcattctttagaatgtcactctttactgtggcctttccggcaaacagcttagtcgtccctacatatcgattcacagtcgcatctaattgtgatagcgcggagacgtttgatttgataaacgtaccgcgcccttgttcactataaatgagcccttcataagttagcatttcgagtgctttttgaatggtcattctcgatgtttcgaattcttgggctaacttcttctgttcaggaagcggaccatcagctgaatattgtccttctaaaattcgggtgcgaatcgttgtcgcaatatccttatactttgccatagtaaccacctaccatttgatatggttattatagcatattcagattcggaatattcgttgttcaaattataaaatatgactttacaagttacattaaaagcgctatcataaaatcattcaagtgatggaggtaccatgatgacgttagacaaacattttttatggggtaattctgtatcaagtatgcaaagtgaaggtgcctgggatgctgatggtaaaggtttatcagtgtacgatgtgaaacctgagacagctgatttatcggattggaaagtgggaattgatgaattccaccgttatcaagaagatatcgatttaatgcaacagatgggtatgaactgctatcgtttccaaatttcatggacgcgcattttcccaaatggtgatggtgaaattaatttagcgggattcgattattatgatcgattgatatcagctttgctcaaagcgggcatcgaaccgatgatttgcctgtaccattttgacatgcctttgcatcttgctgaaaaatataatggtttctcaagtcggtatgtcacacaagtattcactaagttcgctaaggctgtcattgaccgttatggtggacaagtcaaatattggctaagctttaatgaacaaaatggttttttctttgaacctggctttgataatactggctttatcaacggagagcgcgacttattaaccctttatacgatcgctaataatacaatggttgcgcatgctgaaatcgccaattacttacacgcccactaccctaatgaccaaattggtgggatgttagcctatcaagaattctatcctgcaaccagtcatccccaagatatctttgctgctagaaaagcatcagaatttatcaaccaacatttcgttgacgcctttacaaaaggtcactattcagccgaagtactgcaatatatgcaaaatcatgacttaatgagcagtattcagcctggtgatttagcgctcattgcaagtcatcacaacgacttcttagcgttcagttactactacactgtcgcactcgatcacacaaaattaacacccaacacaccacccaattattacatgcgcgatgcgagtgtccctaatccttatttagaaagtagcgaatggggctggcagattgatgccctcggttttagaaacgtcttaacaaaactttcgaatgaaactggcctccccatcttccccatcgaaaacgggattggcattcgcgaagaatcgctgaatcatgaaatgattcaagatgacgaacggattgcctatcaccgcgaccatatccaggctttgaaagacgcagttgatgaagacggcgctcacgttgtgggctatcttggttgggggttaatcgacatcccaagttcaaaaggtgatatgaataaacgctatggcgtcgtttatgtcaatcgaaccaatcacgacctcaaagaccttgctagaattccgaaggctagtttttattggctgcaaaaagtcattcaatctaacggtgaacaattagactaaaaaaagtgcgttaaaaggagtgttttctatgcttaaacaaggaagtcggcgacaaagatttattgatcagtttacaaatatcgcctttaaaatcgggaatcaagtgcatttgcgttcattacgtgatgccttcgcgattattatgccactattcatcctcgccggaattggggtgctcgtgaataacgttgtattcccttgggtcctccacggccaaatgctaaccaactttcaatacttcggcacttacattaccaatgggactttgaacgttgctgggctattactcgcacccacaatcggctactgtttagcacgtaataagaattacgtcaacaaaatttccgcggctgtcatggcactagggactttaatcatcatgatgcctaatactgttccggtcacaccactagctgccaagaaagccgtcgaagtttctggcgtcttaactttccaaaacgtgggaacaaccggaatgtttgccggcattattattggtttagtcgcaacagaactctttatgactctttcaaagcttaaaaaattacagattaacttgagtgatgccgtcccatcagctgttgctggttctttcaacacaatgattccagccctcattaccatgagtctatttgcggcacttgctgcgattttaacggctggtttccacactgatctcatcactttaattacaaatgtgattcaagaaccacttcggcgcattaatacaagtttactgggtctccttctgatttacgggactggtaatctcctcttctcatttgggatccatcaagctgtcattaacggtactttattggatccagtcttactaatcaacatgaacaaaaatatggcagcttacgcagctagtcaacacatcccttatatcatcaacaacgttttccgcgatacatttgggatgcttggtggtaccggtagtactatttgtttattgattgcgaccttgctcttctcaaaatcacgcgctagtcgtgatattacaaagctatcattcgtcccaagtttatttaacattaacgaacctgttattttcggttatccaattgtcttcaactttgcgctcatcattccatttgtcctaatgccaggacttggcatcagtattgcctacttcttcaccgcaattggctggatgaatcgagtagtcgtcatggtaccttggaccacaccaccattactcaactcctatttagcaaccggcggcgattggcgcgcccctgtgattcaaggcttcactttaatcctcggcgttctaatctactggccattcctgaagattagtgaacgcgttgcggccaaacaagctgaattaacgcaataattaaaaaagaattcggaattttctaacgaaaattccgaattcttttttgttttaccgatgactctaacctacccctagtcttataaatccggattaggcgtaatcacttgcaacttatgttctaagagtcgcatctccaatggtgacttggcactcggatcaccatcaatgcgggtttgtgcactttgctgattgtcgactgtgatgctgatttcattcgctttaaagtaagtcatcccgggaatctttttaaaattacccgttaagaaataagggagaaacatcactgaccgtgctagcgacattttcggagcaacgaagacatggaaataaccatcatcgggttgcgcttcgggattgaagttggtaaatccaccaacggaattcgtgagggtcaccagcaagaattgcgtgtctttttgccagtgccgatcaggcgtttcaatcgttagtggataatgctgatgctccgctaatgcatggatgcctttgcttaaaaaagctagcggcccccatttttgtttttcactctgagtcacgttcaacgcggcgtccgccaaaatgcccaatgtcattgtactaatcaagtaatcatcgttcacttggccgacgtcgagtgggcgcagatgaacctgctgcagattttcaatcgcttgatcaatgtccaacgggatttgtaacatccgcgccaaattattcacggtcccagcaggtacaatgcctaaataaggcggctgatctaacgttgcaagaccactaacgacttcattaatggtcccatccccgccgacagcgaccaccacatcaaagcctgcccgcgccgcttttttagctaaccgcgttgcatctttcggcccttccgtcggcatcagttcgaccttgtgttgattcttgatgagtgcctgctcaattttctgaccaaccgactcaccattgttgtgcccagagtggggattataaataacggcataacgatacataaaaaagcctccttcaattactctaagcatagcaaaaatattgggaataggctgggatggcgcattaggcttacacttaaaaattccgatggtgtcaaaaacaaaaaaacaccccgcaatataaaattgcgaggtgcttgtaaacattgatataaaagtgatattaacgtttactgaattgtgaagctttacgagctttcttaagacctggtttcttacgttccttcatacgagggtcacgtgttaacatgccagcgctcttaagagctggacggaagtcagggtcaactgtcaatagggcacgtgaaataccgtgacggattgcaccagcttggcctgagaatccaccaccattaacgtttaccaagatatcatagctatctgttgtttcagtaattgttaaaggttgtttcatatctaaaatcaagttagcaaatggaatgtaatcaacaacgtctttgttgttgatagtgattttaccagtacctggtactaaacgtacacgagctactgagtttttacgacggcctgtaccgttataagttacttgagccactatagtttcctccttaaataatgtccgtaatgtctaagacttctggattttgtgcttggtgtttgtgttcgccaccagcgtatacgtgtaacttcaagaattggttgtgacccaatgagttcttaggtaacatccctttaactgacatttcaattaaacgttctgggttgttttcacgaatttcgccagcagtccgagttttcaaaccaccaggatggttactatggtgatgatataacttgtcggttgctttgcgacctgttaatttaattttttcagcgttgatgacgatgatgttatcacctgtatcaacgttaggtgtaaatgttggtttatttttaccgcgtaagatagaagcgactacagttgatagacgacctaatgcaatatcagttgcatcgatcacataccatttacgttctacttcgcctggtttagccatgtaagttgtacgcacgatttattcctccaatattctgtgtttgtttgacactcaataagtttccggggcctatcgtggggcaaacaataccagatactatagtatcgtaattttacgattaagtcaattgaatctcaattattttcatcagtttcgtaataaacttttttaaggtacaaaccgcttgctggcgcggttgagcgagcctgttgacggtccttaacttcatacagccgtaaaaaatcgtggacatcccgccggccgttaccaatttctaataaagttccgaccaagatccgcaccatgttatacaaaaagccgttcccataaaactcaaaaacgagttcattttcgggttcattgaaaacaacggtcgcatcataaatcgtccgcaccttatccttaatgaccccacctgaagccgcaaaactcgtataatcatgcgtgcccatcacatctggcagcgccgcttgaatccgttccacatcgattggatacggataatgaccggtataacgtcgcttgaatggattcgtataatgcccaagatcgacccgatacatataccgtttaccgaccgttgaaaatcgtgcatgaaagtcatcatccgctaactgactatccacaacctccatatcaagcggtaagaggctatttaaggcccgtaacatactaatagcgggtaattgacctggatagtcgaaatggaccacctgccccgttgcatggacacctgcgtccgtccgccctgaaccatacacttgaatataagcacccttactcatctttgtcagtgctttttctaatgtgccctgtactgttcgttggttcggttgcacttggaaacccgcaaaatccgttccatcataggcaattgttacgcgataccgttgtgtcattttatccctcttgtgttaaaaagttagtagttctattctaaataattttctgaaaagtagcaatctttttatgaatgttcgtaaaaaatttgatttaaaaatgcatttttaatataaaacaagttcaaattctgtataattattattataagtagaaataatgagaattgtgcaatgaagttcggatacgcacgcgtttcatctgccggacaaagtctagcaacccagattagtcaattaaaggaagaaagctgtgacattatctacagcgaaaagtttaccggaactaccgttgatcgccccaaatttaatgaactattagatcgggtttcaagtggtgataccatcgttgttacacaacttgattgcttcgcaagaaataccaaagaagcacttgaaatcatccaagaactttttaaagcccgcattaaaattcatattttgaacatgggcatcattgaagacaccccttccggacgactcatttttaccttatttagtgcttttgcgcaatttgagcgcgatatgattctcacccttacccaggaagggaaacataatgctcgtgtcaccgaccctagttacactgaaggtcgtaaaacgacctatactgatgatgacatacaagcagccctagacatgcgtgaagagggctttacgtacgctcaaattagttaccaaactggcattagtgcttcaacgttgaaacgtcggttcaaaaaaacaagctaatcaaaaaagtgcaaaaaaaaggactcagctaaatcaacctccgttggtttaactgagtcctttttgcgttatcttaagaataaaagtgcgacggttaaaaggcccatcgtgataaatgccacggtgtctcttgtccgccatttcaaaattcggtacttactgcggccttcgccaccttggtacccccgtgcttccattgccgttgctaaatcatccgcgcggttaaaactgctgacaaataacggaattaaaatcggcacgattgctttcatttgttggaataaattcccttcaccaaaatcaaccccacgcgcacgttgcgcatccataatcttagtggtttcatccatcaatgttggtacaaagcgcaatgcaattgatagcatcaatgcaacttcatacactggaaaatggactactttaagcggcttgagaattgattcaatcgcatccgctaacgacaatggcggcgtcgtcaatgtcaggagagtcgacatgaaaataatcaatacaaagcgcatgaagatgtagacgccattaatcagcccgtactgggtaagcgtcagaaatccccactgccaatagacatgaccaccacgggtgaagaaaatctgtaagagcactgtaaatagaattagccataacagcggcttaactcctttaataaagaaggcgagtttaatttttgaaatcccgattagcgctaacgtaaagaccagtaataaagcataggcttgccatgtacgcgctaaaaagatgatcccaatataataaaaactggctaataacttcgcccgtggatccatccggtgtaacactgaatcaccggggatatatcggcccagaattaatttattcatgtccaatccccgccttcttcggtagttgttccgctaataaggcggccaattcatgttcggttagtggtacttgatcaaagacaaagccttgtcgcattaaagcttgcgcgaactgagtcgttgttggtaagccaagttgtttttccgttaaccaatccggatccgcaaaaatttcgcgtggtgctccggtcttagctagcttgccatgttccaaaacgataacgttgtcggcgtagttcgccacatcatccatctgatgggtgaccatcacaatcgtcatcccctgctcactgtgtaacttttcaaaaagcgtcatcatctcacgccggccaactggatcgagccccgcggttggttcatctaagaccaatacttccggtttcattgccaacacaccagcaatggcaacgcggcgcatttgcccaccagataaatcaaaaggtgacttgtcaatcacgttagcgggtaaaccgacgagttcaatcatctctttagcgcgttcaagtgcttcagcttcagggacaccgaagttcttcggaccaaaagcaatatctttttgcaccgtcgactcaaataattggctttcaggaaattgaaaaaccatcccaactttttgacgaacagcctttaagtttttgttgttggtctcaggcgtgatttcgcgctcaccaatctgaacaacgccgctcgttggttttaagagtgcattgaggtgttggagcaatgtcgacttgccactacctgtatgaccaatcaaagccgtataggagccacttggaatggtcacattgatattttctagcccaatcccttgaaaaggcgtgcctggctggtaagtgtagcttacatttttgaatgtaatgtccataagtactcaaccatcctttccgttgtgagataatctgtgggcatctcgatagcgcgttcatttagcgctgctttaagtttttctggatatggaacatctagccctaaatcaagcaaacgttgcccatatgcaaaaatatcggccggtgtgccctgatcatgcacttgccccttatctaagataatgacccggtccgcacttgcggcttcgtcaatatcgtgggtaattgatagcacggtcatgtttgtttcttgttttaacttatgaatggttgcgagaacttcttcgcgcccttttggatctagcatactggtggcctcatcgagaatcagaatctcaggttgttgtgcgatgatccctgctaaggccactcgttgtttttgaccacccgacaaacggcttggttcacgtttcaagtattcactcataccaacacgttcaaccgcgtctttaacccgttcaatcatttcagctcgcggaatcccctgattttcgagaccaaaagcaacatcgtcttcaaccgttgcaccgacaaattgattatccggattctgaaaaaccatgccaattttctggcgaatagtccacacgttatccaacgacaatggtaacccatcaatcgtcactgatcccgattgtaaatctaacaaaccgttcaatgatttcgcgaaggtactcttaccactaccgttatgaccgataatggcgacccattcgccggcattgatactgacagaaagatcattcagtgctaaatgtccttcagattgtgggtattcatattttaaatgttcaacttgaattattttttgctcattcatgattaataacccgtattttccttggaattaaagtgcattggttatgttatccatgcacgtttcaaatcaaaaacctgttcctattttatcatataaaaggccatagcgctttcgttagtcaccctttattcaaaggatatccaacacaaaaaacgtctaactccgatttaactcggaattagacgttattttatgtaaatcatcaatcgatgaaagccatactgtgttgctagtatgaccttaggactagactcggagtacttccatcatcataacgccctgtctcatcgatcaaatgacctaaatcattttgtgattaaacaagttcaataatcaccattaatgcaccgtcaccacgacgaggggctgttttaagaatacgtgtgtaaccaccatttctttcagcataacgtggagcaatgtcactaaataatttttgtaaagcagattgaacgattacagcatcgtcttcttcgcgaatatcagctacttcgttacgaacgaatgctgcagcttgacgacgagcgtgtaaatcaccgcgtttacctaaagtgatcattttttcagttgttttacgaatttctttggcacgagcttctgtagtaatgatacgttcattgatgattaaatcagttgtcaaatcacgtaacattgccttacgttgtgagcttgtgcgacctaatttacgataactcatgaatggagtccctccttcttatcagtttattcttctgtgcgtaagcctaagccaagatcaaataacttgttcttaacttcttctaacgacttgcgaccaagatttctaactttcatcatatctgcttctgatttgtcagttaactcttgaacagtgttgattccagcgcgtttcaaacagttgtatgaacgaactgataaatctaactcttcaattgtcatttcaagcattttctctttatgtgtctcttctttttcgaccatgatttcagcatttttcgcttcatcagtaagatctacaaagattgccaaatgctctgtcataatcttcgcagctaagctaatagcttctctaggactgatggaaccgtttgtccaaacatcaagtgttaacttgtcgaaatcgttacgacgaccaacacgtgtactttctacttgatagttgacacgactgattggggtataaattgagtcgattggcaaaacaccaattggcatatcgtctgacttgttttgatcagcagcaacataaccacggccttttttaactgtcattcgcacgtggaaattgccgccttcagctactgtacaaatatattgatcagtatttaagacttcaacgtcatcatcagaaatgatatcagcagcagtaactgttgccggacccttaacatcgatttcaattgtcttgtcttcttcaacatgcaatttaagtgctaattttttaatattcaagatgatttgtgttacgtcttctaggacgccatcaattgttgaaaattcatgtaaaacaccatcaatttgaatatctgtgacagcagtacctggtaaagaagcgagtaaaatacgacgtaaagagttacctaaagtcgtaccatagccacgttcaagtggttctacaacgaacttaccgtagttagtactttcatcaacctttgtaatgtttggtttttcaaattcgatcattcttatcttttacccctttcaaaacgagaagtgtttatacgtgaacacgtttcagtttgtctcaaaatgaagcgtagcccagactaaacacgacggcgttttggaggacgagatccattatgaggaactggtgtaacgtcacgaatagcagtaacttctaaaccagttgcttgtaatgagcgaattgcagcttcacggccagaacctggtcctttaacagcaacttcaacagatttcataccatgttccatggcttctttaccagcagcttctgcagccatttgagcagcaaaaggtgttgacttacgactacctttgaaacctaatgaaccagcagatgaccatgcaacagcattcccatgaggatcagtgatcatcacaagagtattgttaaatgttgagtgaatatgtgcaacgccggcttcgatatttttcttcacacgacgcttacgtggagcatttttcttgtttgccataaattataacctccttttactgattatttcttcttgcctgcaatcgtaactttcttacctttacgagtacgtgcgttgttcttcgtgttttgaccacgaactggtaatccacgacgatgacgcatgccacgataagaaccgatttcttgtagacgtttaatgtttaagctaacttcacgacgaagatcgccttcaactttaactttgtcgattgctgcacggatcttgtcttcttgatccggcgttaaatcacgagtacggacgtcttctgcgacgccagcatcagccaagactttaacggcagttgtatttccgataccgaaaatataagttaaagcaatcacaatttgtttatcacgtggtaaatccacacctgcgatacgtgccattcttgcacctcctgcttaattaatattaaccttgacgttgtttatgttttgggttagctgcgcagataatcataacgcggccttttcgtttgataactttacaatgttcgcacattggttttactgatggtcttactttcatatcgactgacctccttgatatgatccttacgcctatttaaagcgatacgtaattcgtcccttagtcaaatcatagggtgacaattcaactgtcacacggtctccaggtaaaatcttgatgtagttcttacggattttaccagaaacgtgtgccagaataactgcaccattttcaagttctactttaaacattgcatttggtaaagtatcagttactttaccttcaatttcaatgacgtcatcttttgccacgcaaaagtacccccttgtggttgtgaaaattcatacagaaaaatggtgagagctctccgcactcaccgctagtggtcataccgagatattatatcacaagtattaaatttttaaaagcactgagaattctgtcattaaacaactagtcaggcttttacgtgaacaatgaccgtgagatcacttgagttgatgactagtctttaatggtatcaagtactttttgaacggcagagaacacatcatcaatttcttgattcccatccaccgtgtaaagtaggttacgtttttcataataatcaagtaaaggtgtattcatttcgatattgacctttaagcgattcttaaccgtttcaggtttgtcgtcttctcgttggaagaaaacatgttcgccgcaacgatcacatgtaccttccactttagttggatggtaaagtttgtggtacgttgcaccacaatttttacaaataaagcggccagataaacgatcagccaagatttcaggatcaacatcaatgttaatcacaccatctaaaggtttgttcaatttatcagtaatggcagctaaagcatccgcctgatcaagagtccgaggaaaaccatcaaggagataacctacattagtatctgcttgtgcaagacgttcctcaacaattccgttggtcacatcatctggtaccaattcacctttatcgatgaatgacttagctttaaccccaagttctgtttgatctgccatagcagctctgaacatgtcaccagtcgaaatgtgtggaatatgataagcgtcaacaatcttttcagcttgcgttcccttaccagcgccgggaagtcccattaacatgagattcatgcctttgcctcctatttaaaaccaggattcaatactttttaaacgataattgcttatcgaatgaatccaacatacttgcgtttcataagtaacccttcgagttgacgtgtgctttcaagcgcaacaccaacaacgattagtaaactcgtcccacccaaaccaattgattggggtaagccaccgaggtttgctgctaattgtggtaataatgcaattaccccaaggaacaacgcaccgacagttgaaagacgcattaatacgctagaaagatacttctcggtacctttacctggccaaacacctgggatataactcccttgcttagtcaagttctccgcaactttttcagggttaacctgaacaaaagcatagaagaaggtaaagagaacaatgagcaccgtataaacaatcgaacctgtcacagtctgcatgctgaagatatctgataatactttaaaccaagtatctgcaccatgacctgattggaaggccattaagattgtttgaggtgtcataataaatgaactggcgaagataaccggaatcacaccagcgacgttaactttaaggggtaggtaactattttcacctgcaccagcttcacgacgcgtatattgaatcggaatctttcgatttgcttgttggacccatgtcacaaatgtgacaatcacgagtactgcaataatcaaaccgatgatgaataagacacctttccacatatcgccttttgaagcgttcaagacttgttcgcggaagatttggtaaagaccgcttggaaggcgtgcaatgatccctgcaaagatgatcattgacacaccattccctaagcctttatccgttatctgttcacccaaccatgtaattaacatcgtaccacccgttaaaatgatcccgatgctaacgaaggtcttaatccccggatctttaaccaagcccatttgactgagtgagttaaagccagcggtaatccctatcgattggataaatgctaagatgatggttaagtaacgcgttacttggttaagcttacgtcgcccaacttcaccttgcttgctccattcaacaaacttaggcacaatatccatttgtagtaattgaaccacaatttgggcagtgatgaatggtgaaacccccatcgagaagatggaatagttcgccaagccaccaccacttacggtatcaagcaatgggatcaaaccagttgaacccaacttagtcaatgcaccagcattcacacctggtaccgtaatttgtgcacctaaacgataaacgatcaaaacgcctaaagtaaacaaaatcttactacggatttcctttactttaaatgcgtttttgagtgtctttagcaattaaatcacctcaattgaaccgccagcagcttctacagcagcttttgcagcttcagaatacttgcttaccttaatgttcaattttttgtttaattcaccattcgctaataatttaacacctgataattcattcttaacaacgcctgcttcgattaaaacagttgaagtaatttctgcaccgtcttcaaaacgatttaaatcgtttaagttgacaacagcatattccttacggttgatattcttgaatccacgttttggcatacgacggaataaaggcatttgtccaccttcaaatcctaaacgtactttactacgagctttttggcctttttgaccacgaccagcagttttaccagtacctgaagaagtaccacggccgacacgtttacgaacgtcacgagcaccttcgttaggtttcatttcatgtaatttcattattgtgcgcacctccttgcaatatatgttgaaattagtctttaatttcttcgactgttactaaatgtgcgagtttgaaaatcacaccgcgagttgcagcatcatctggtttgattacagaactatttactcggttcaagccaaattctttgaccattttacgttgttctggaagacgatgagcagcactttttcttaaagtaatctttaatttagccatgttcagttatcctcctagttttgtaagctttctacagatacattacgtaattctgcaatttcttcagcagtcttcatacgagttaaaccgtcaattgtggcacggataacattgatagcagttttgctacctaatgttttacttgtcacatcatcgattcctgctaattccatgacggcacgaacagcaccaccggcagcaataccagaaccttcaacagctggttttaatagaacacgaccagcgccgaagcgaccaataatttcatgaggtaatgttgttccgaccttaggaacattgataagattctttttagcgtcttcaacggctttacggatagcttcaggaacttcttgtgctttacctgtcccgaaacctacgtgaccgtctttatcaccaacgattacgattgctgcgaaacgtagacgacgtccacctttaacaacttttgtaacacggttgattgaaacaacgcgatcttctaaatctaaatgagttggatcaatgtaagtcataaatggttttcctccttattagaattctagtccgttttcacgagcagctgtagctaaagcttcgatacgaccgtggtataagtaaccgccacgatcaaaaacaacaactttatggccggctttaacagcgcgttgtgcaactaatgcgccaacttgttgtgcttgttctactttagtaccttctgcttttacttctttatctaatgttgaggcacttgctagcgtcacacccgctacgtcatcaataagttgagcgtagatgtttttgttagaacggaaaacgttcaagcgtgggcagtcagcagtaccagagatcttgccacgaacgcgtgtatggcgtttttgacgtgtcttattcttgtctggttttgtaatcacaattttcacctcttaatatcgtttaacagctcaggctgctttatttaccagttttaccttctttacggcgaacatattcatcagtataacgaatacctttacctttgtaaggttctggaggacgaacatcacggatttcagctgcgaattggccaacttgttgtttgctaataccgctgatgatgatgtttgtgtttgatgggacttcgactgtaacgccttctggggcttccatttcaactggatgtgaatacccaacgttcaatactaaagtcttgcctttcaattgagcacggtaaccaacaccgataagatccaatgtcttcttgaaaccttccgttacgcccaagatcatgttgtttaagttagcacgcatagtaccgtgcattgcacgatcactttcactattacgtgtaaagttgataaggttaccttcttcgtgcatttcaatcactggactgaaatgacgtgttagttcacctttaggtcccttaactgtgatgttttcaccgtctttagtaacggtaacacctgcaggaacttcgattacttttaatccgatacgactcacgttatgacacctccttattttaagtttagattaccaaacgtatgcgagaacttcgccgccggcagccttttcacgagcttctttgtcagttacgacaccgttgcttgttgagataattgcgatgcctaagccgtttaataccttaggaacatcattagctttaacgtaattacgtaaaccaggttttgaaatccgtttcaaaccagagataacacgttcgttattcttaccatatttcaagaatacacggatgataccttgtttgtcgtcttcaatcacttcgtaatcgcggataaagccttcgcgtttcaaaatttcagaaatttcttttttcatacgtgaagcagggacttctaatgattcgtgatgtaccatgttggcattacgaatacgtgttagatagtctgcgattggatctgtcatgaccatgtggaattaacctccttattgactctttataattaccagcttgcttttttcatgcctggaatttggcccttatgagctaattcacggaggcaaacccggcaaagcttaaacttacgatatacagaatgtggacgtccacaacgttcgcaacgtgaatattcttgtgttgaaaattttgctggacgatgattctttacaactaaagattttttagccaagaaattgacctccctttttatttagcaaatggcatgccaaattgtgttaacaattcgcgtgcttcttcgtcagtatttgaagttgttacaataacaacatccaaaccacgaacgcgatctaccttatcataatcgatttcagggaagatcaattgttcgcgtacacctaatgtataattaccgcgaccatcgaatgattttgcactaacaccgtgaaaatcacgaacacgaggtaaagatacgttaactaatttatctaagaaatcgtacattctttcgccacgtaaagttactttagcgccgattggcataccttcacgtaaacggaaaccagcgattgatttcttagcttttgtgattaatggtttttgaccagcaatcaaacctaattcttcaacagctttatccaaattcttagcgtttgaaacagcatcaccaacacccatgttaagtacgatcttttcgatcttaggtacttgcatgcttgatgtgtagttgaacttttcgatcaacgctggtgtcatttctttaacatatttttcttttaaacggttagtcatgtaaaaagtgcctcctttccccaaaagattatttatcgattgattctccagttttctttgaaacgcgtactttcttaccatcaatcactttgaaacctacacgagtagcttcgttggttgatggatcaattagcataacgtttgaagcatcgatacttgcctctgtgtcaacaatcccaccattagggttttgagcatttggcttaacatgctttttaatggtattgataccttcaacaacaacacggccttctttaggcatagctttgatgattgtaccttctttacctttatctttaccactgattactttaactttatcaccagttttaacgaacattgatatacgcacctccttggttgtctgtaattatagaacttcaggcgctaaggaaacgatcttcatgaaatcactgtcacgcaattcacgtgcaactggcccgaagatacgtgttccttttggagtcttgtcatcattgatgataacagcagcgttttcgtcgaacttgatgtaagaaccgtctgcacgacgagcacctgacttagtacgaacgataacagctttgacaacttcaccttttttgacaacgccacctggtgttgcctgtttaattgttgcaacgataacatcaccgatgttagcagtcttgcgacctgaaccacccaaaactttaatagttaaaatttcgcgggcaccggagttatcagcaaccttaagacgactttctgattgaatcacttataggtcctccttccgtcacttatatatatattgagtaacgatttagataataactgctttttcaacgacatctaataaacggaaccgttttgtacgtgacaaaggacgagtttccataacacgcacaacgtcgccaacttttgcttcgttgttgtcatcttgtgcataatatttctttgaatatctaacacgtttaccatattcaggatgtgttttataagtttcaaccacgacagtaattgttttatccattttgtctgaaacaacacggccttggtacactttacgatggttacgactttcttcgctcaaagtaaatagctcctttccatttattatttgttaagttcttgttgacgtaatacagttttaatccgtgcaatgttctgacgaacttgctttaagcgggcggtattttctaattgaccggtagcttgttggaaacgaagattgaataattcttctttgtattggtgttctttttcaagcatttcagcagtggttaattcaataatatctttagccttcatttgactcgccacctacttcctcgcgttttacgatcttagttttaactggcaatttatgtgatgccaagcgtaatgcttcacgagcaacttcttcagaaacgccgccgatttcaaacatgactttttcacgttttactacagcaacccatccagcaggagcacccttacctgaacccattcgaacgccgacaccttttgcagtgtatgatttgtgagggaaaattttaatccacactttcccaccacgtttcatgtaacgagtcatggcaacacgagcagcttcgatttgacggttggtaatccaacttgattctaaagcttgtagcccgaattcaccaaaagtgacttctttgccaccttttgcagcaccgcgcatcttcccacggaattcacgacgatgttttacacgtttaggtactaacatgtttatttccctcctttcgtattgttgttggctttagcgggtaatacttcgccccgataaatccaagtcttaactcctaatttaccgtaagtagtcatggcttcgtcccatgaataatcgatgtctgcacgtagcgtatgcaaaggaacagttccttgagcatgtgtttcgacacgagacatgtcagcaccgttcaaacggccggcaacttgagttttaatacccttagcaccagcgcgcattgtacgttgcatagcttggcgttgagcgcgacggaaagcaacacgtgcttccaattgacgagcaatgccttcacctactaagtgagcgtctaaatcaggtttcttgatttccacaatgttgatgtgtactttcttacctgttaagttgtttaattctttacgtagattttctacttcagaaccgcctttaccgatgaccataccaggtttagcagtatggattgaaacgttcacgcgatttgcagcgcgttcgatttcaatagtagagacagatgcgtcagctaattttgtgttgatatatttacgaatcttaagatcttcgtgtaagaatgttgcgaaatctttttctgcataccatttagcgtcccaatcacggatgacgccaacacgaaaaccggttggattaatcttttgacccacgcgatatccctccttatgcttctttttctgatacaactacagtgatgtgacttgtacgtttgttgattggtgatgctgagcctttagcgcgaggacgaaaacgtttcaatgttggtccttcgttagcataagcttctgtaacgaccaagttttctgcatctaagtcgtaattatgttctgcattagcgatagctgatttcaaaactttgattacgactggtgaagcagctcttggtgtaaattctaagattgcaattgcttctgcaacgctcttgcctctaatcaagtcgactaccatccgtactttacgggctgccatccgaactgattttgcgctagctgttgcactagtaatttgatctgccattgagattcatcctcctttctagcgtgcttttgttttcttatcgtcatttccatgaccatggaaagttcttgttggtacgaattcacctaatttatggcctaccatatcgtctgagatgaaaacgggaacgtgtttccgtccgtcataaacagcgattgtgtagccaataaagctagggaaaattgtcgagcgacgggaccaagtcttgatgacttgtttcttttcgctatcggcttgtgcttcaatcttgttgagcaagtgtgcgtctgcgaatggtccttttttcaaactacgactcattatgaaacctccttcgaataaaaagttcaatgtgacttatgtttaagccgcattggctttagacatgttcaattggaattgattatcttgatttacgatgacgaataataagtttctctgaacgagccttactactacgagtcttcttaccaagcgtcttcttaccccatggagacataggagaaggacgaccgattggagctttaccttcaccaccaccatgaggatgatcgttagggttcattactgacccacgaactgtaggacggatacccatccaacgtttacggccagctttaccaatcttgattaattcgtgttgaccgttaccaacagtaccgatcgttgcacgacatgtaagtaggatcatacgtgtttcgccagaagttaaacgaacgatagcgtatttgccttctttacctaataattgagctgatgtaccagctgaacgaaccaattggccgcctttaccaggttttaattcgatattgtggataagtgtaccatcaggaatattagctaatggtaatgcgttacctactttaatatcggcatccacaccagattcaacaaccatgcctacttcaagacctttaggggcgatgatgtatgctttgataccatctggatattggattaatgcaatatttgaagttctgtttggatcgtattcaattgacttaacagtcgctttgataccatctttgatacgtttgaagtcgatgacacggtatttttgcttatgaccgccgccacgatgacgaacagtgatatgaccatgtgcattacgaccagcagtatggctttgggattccaacaacgtcttttcaggggttgtctttgtgatctcagcaaaatctgagctggtcatattacgacgaccatttgtggttggtttgtacttaataattcccacgtgtataccctcctataattattctatttaagtgttgcttaatcttcgaaaatcttgatttcttttgaatcagcagttaaagtaacgattgctttacggcgttttttagtatagccagcatagcgaccttgacgttttaacttgccacgaacgttcatgatgtttacgtttttaacgtttacaccaaagatttcttcgattgcgtaacgcacttgtgttttgttggcacgaacatcaacatcaaatgtgtatttcttgtcgtccattgcagccattgaattttcagtaactactgggcgtaaaataacatcgcgtgcttccattatgcaagcacctcctcaattttagaaagagcagcttgagtaaggattaatttttggttgccaacaacgtctaatacgttgataccatcagcagctacaacggttacgttaggtaagttgcgagctgataatgcagcaaaatcatttccgtcttcaagtactaccaatgctttagtattaacgtctaacttgttaagtacttcagcgaattctttagtcttaggtgcgtcaaagttgaatgcatctacaacaactaaatcattgtcgataaccttttgtgaaagtactgacttgattgcaagacgacgtactttacgaggtaatttgtagctgtatgaacgaggtgtaggaccaaatacggtaccaccaccacgccattgaggtgaacggattgagccttgacgagcacgacctgtacctttttgacgccaaggtttacgaccaccaccacgaacagctgatctgttcttaacagcgtgtgttccttgtcttaatgaagcacgttgcatgatgattgcatcaaacacaacgttttcgttaggttcgatagcccagattgagtcgtttaattcaacgttcccattttggctaccatcttgtttaaataatgttacgtttgccattggtaaaatcctcccttctcagattatttgttacgagctttaacagctgttttgattgtaatcattgagtttttagcacctggcacgttacctttaacaaggataacgttcttttcaacatctgtacttacaaccacaaggttttgaacagtacgttggttgttacccatgcgtccaggtaataatttacccttgaagacacggttgataacagcacccattgaaccaggacgacggtggtaacgagaaccgtgacccataggcccacgtgattgtccgtcttttttaatgttaccttggaaaccatgacctttcgttacaccagtaacgtcaacgacgtcgccggctgcgaaagtatcaactttgatttctgttcctacttcgtaatctcctaatgcgacatctctgaattctctaatgaagcgcttaggagtagtatttgcttttgctacatgacctttagcaggtttgtttgacaagacttcgcgtttatcttcaaaaccaacttggatggcttcatagccgtctgtttcgtttgttttaacttgtaaaacaacgtttggagttgctttgataactgttacgggaattaattcgccgttttcagtaaagacttgtgtcatacctacttttctacctaagattccttttgtggtcatggtaacacctcttttctagtatttttaattggttggtacgaattaaagcttgatttcgatatctacaccacttggtaagtcaagtttcatcaatgaatcaactgtcttaggtgtagggttaacaatatcgattaaacgtttgtgtgtacgcatttcgaattgttcacgtgaatctttatgcttatgtggtgaacgaagcactgtataaagtgttctttcagttggtaatgggattgggccagagatagtagcacctgttctctttgctgtttccacaatcttgtcagctgattgatccaaaatacggtgttcgaatgctttcaaacgaatacgaatcttttgttttgccatgtttttccctccttcgtctattttaaaagtagactagctccgtgaaaatttttccggcacgcccgcccatggcaaagcggccgggtgtgtcgcaacctctcacatcttagctactcggtaatctttttgactaccatggtgcgcactcctgctatggaaatagcactttatctatcttacaagatacaacccgataacgcaacccttttttgctgatttatcaaagtttttcataacattttcataaatcttgtagcaagcgtcattcgtggatttctagccatgttttgatacactgaaagcaacttaaatcccctccaggaggtccttatcatgtcccataacgcacttttgattatcgactatacaaatgacttcgttgacccaaacggtgctctgacagccggcaaacccgctcagcaaatcgttcctgtaattatcgaattagctaaccagttcctagcagccggtgattacgtcatcttaccgactgatttacacgtcaaggatgatccatttcatccagagagcgccctattcccaccacataatctagccaatacttggggccgtgagttttacggaccactagctagctggtacaccaagcaccaaaccgatcctcacgtctatgcatttgcaaagaatcgctattcagcatttgctaacactaatctggataatttcttacgcgagcgcgagattgacgcgttaacactgactggcgtttgcaccgacatttgcgtgctccacactgcagtctcggcatacaacttaaattacccactaacaattccagccgctgctgtcgcaacttttacaccgaacgggcaagaatgggcactcgcgcattttaaaaacagcctcggagctacaattatctaatttgacttttaacgatcatctgctatcttaaatgacgggacaatgtacccattctatggattcaaactttagcagccaatattgcaacgattttcatcgtaacatccgccaatcaagaattcagcgaagcgcgcttacaacgctatttaacgatggcttgggatagcggcgcaacaccggtgattgttttgagtaaaaccgatttagtcagcgactctgagctaacaacctttcttgacgccgtcgcaagtgtgacattcgacagcgttcccgtcatcacaactggccagacggcatcaaatgttgcagcgactttcaaaccgtatttaacagctggacaatgggtgacatttgtcggctcatccggcgttggtaaatcaaccctgatcaaccagctcattaaagagccttccgttttaacgagcggcattcgcgatgacgatgataaggggcgccacacaaccaccaatcgacaagcctgtcaaactgctagcggggccttcatcgtcgatactcctggcatgcgcgaactcggcatgacaagtagcatgtctaaggcactcaagacagtctttactgatattgagacgctcgcacaggactgtcgatttaaggattgccagcatcaaagcgaacccggttgcgccgtacgagccgcaatcgatgcaggttcattaatgcctgaacggctagctgatttcaataaactggctatcgaagcggactatagtcaactatccgcccgcgaaatcgaacaagcaaaggttaaacgtctgatgggcagtttgaaaacacgtcctacaaaacaaaactaactcagtaagccgtgcctagaaacacaaaaagggagttacgacaaaagtgatttttgtcgtaactcccttttttggagaagtttatatgaaaaagagtttgagtttttttgccagggcggtggcaaatcgagttagcggggattgaacccgcatgaaccagtcttaatgatcaacaaatccttgcgccttcgaaagcaagtctctatcaatcaccagaaaaccattcactgttcttgggaggaatttcaaatgagccggttcgttttaccattaaactataactcattggcggtgctttacttagacggattctttagggaggaattgtctaatgaaaattcatttaatcttgcttttcaaggtaactttttccgcctaactacgcgaagacaacgatcaccttcgttgctcattatcctcgctatgttatgctcaaaagctaaccaccttgaaaagcatttttaccttttcagattatttcttgggaggaattcatctgatgtatacagaataccaaccagttatgaattaaatatgaactttcatttacgaaactgtaaaatcgcatttttacgcacaaaaaaaggactcgtcgcaatgacgagtccttttccaatcgaaaccaatcacttaagattagcggcttattggccaccgttcttcttgatgatttcttcttggatgctcttaggaacagctgagtagtggtcaaataccattgtaaatgtcccacgaccttgtgtagctgaacgtaatgttgtcgcataaccaaacatttctgacaatggtaccattgcgttaacgatttgggcattaccacgtgcttccataccttcaacagcaccacgacgagcagttacttgtcccatgatatcgccaagatattcttcaggagcaataacttcaaccttcatgataggttcaaggatttcagcgccagcttgtttagcagcgttcttcaatgccattgatgcagcaatcttaaatgctgattcattagaatcgacatcatgataactaccatcatataacttagctttaacgtcaatcaatgggtaaccagctaagacaccgtttgccattgattctttcaagccttgttcaactgatgggatgtattcacgaggaaccacaccaccgacgatagcgtcttcgaattcgaagcctttaccttcttcgttaggtgtaaattcaacccaaacatcaccatattgacctttaccaccggattgacgaacgaatttaccttgtgcagatgcttgttttgtgaatgtttcacggtaagcaacttgaggttcaccaattttggcaaccactttaaattcacgtctcatacgatcaaccatgatatccaaatgcaattcacccatcccagaaataagcgtttcgcctgtttcattgttggtttcagccttgaatgtaggatcttcttcagcaagtttttgtaaagcaagatctaacttatcacgatcttcttttgattcaggttcaacagaaacttggataactgggtcagggaattccattgattccaagattaatggatgatcaacgtcagtcaatgaatcaccagttgttgtattcttcaaaccgattgcagcagcgatatccccagagaatacttcaggaatttcgttacggtgatttgaatgcatttgtaataaacgaccaacacgttcacgtttgtctttagttgcattcaaaatgtatgaaccagattgtaatgtaccagtataaacacggaagaatgttaaacgaccaacgaatgggtcagtagcaatcttaaatgctaaaccagcaaatggtttgtcatcgccagccatcaattcaacttctgaatcatcttctgggtttttagcgttataaggacgtacgtctaatggtgatggtaagtaatctacaacaccatccattaacatttgaacacctttatttttgaaagctgaaccagcgaaaactgggaagaatttcaaatcgatagttgcttgacgaatagcagctttcaattcatctttagaaatttcttcgccttctaaatatttgtccataatgtcgtcattaacatcagcaacagcttcaactaattcggcacgacgttttgtagcttcttcaaggtagtcagcaggtacatcaactgtatcccacttagcacctaattcatcttcatcatagatgtcagcttgcatttcgatcaaatcaataacgccttggaattcatcttcagcgccgattggcatttgaacagcatgtgcattagcttgtaaacgatcttccaatgttgtcattgagtaatcgaagttagcaccaagtttgtccatcttgttaacgaaaacaatccggggaacaccataagtagttgcttgacgccaaacattttcagtttgaggttcaacacctgattgagcatctaagacagtgattgcaccatctaaaacacgcaatgaacgttcaacttcgattgtgaaatcaacgtgtcctggtgtatcaatgatattaactcggttacctttccattcagctgttgtagcagctgatgtaattgtaatcccacgttcttgttcttgttccatccagtccatttgtgaagccccttcgtgggtttcaccgatcttatggattttaccagtgtagtacaagatacgttctgtggttgttgtcttaccagcatcaatatgagccatgataccgatattacgcgttttgtctaacggaaattcacgtttgtttgccataagtgaatattactcctctcgaatattaagctatatacaacaagaggccattatatgatttgaatacatataacagccaaccttgttaatcttaccagcgataatgtgcaaatgcgcggttggcatcagccattttatgtgtatcttcacgtttcttaactgcagcaccagtgttattggcagcatccatgatttcacgtgcaagacgttgatccatggtatgttccccgcgtaggcgagcatagcttactaaccagcgtaaacctaaagttgtacgacgttctggacgaacttcaattggtacttggtagttagaaccaccgatacggcgagctttaacttcaagtactggcatgatgttgttcatagcttcttcgaacacttctaatggttcattaccagtttcttctttaataatatcaaatgcatcgtataagattgttgacgcagtaccacgtttaccatcaatcattaagcggttgattaagcgtgaaaccaatttagaattgtacattggatcaggtaaaacgtcacgttttgcaacatagccttttcttggcatcctgataacctcctcaagatatttaagtccttgaagtaacacacagtgtcatttaaacttcaatcgactttttcaaatttttttgtgtgttattttttaggtctcttagtaccatacttagaacggctttgcatacgaccgtcaacaccggcagtatctaaagcaccacggataacgtgataacgtaccccaggtaaatccttaacacggcccccacggataagaacaacactatgttcttgtaggttatgaccaataccaggaatataagctgtaacttcgattaagttagataaacgcacacgcgcatacttacgtaaagcagagttaggctttttaggtgtcatagtacccacacgagtagcaaccccacgtttttgtggtgctggattatctgtagcttttttcttcatactgttgtagccaaagtttaatgcaggtgcatcagactttgaagttcttgatttacgacccttacgtaccaattggttaattgttggcatttgaaggttcctccttccttgatctgaaagttatttttgagttttaagtccacacatccaggtggttctttttttgcgataaaaaaatggcaacctagattgcgtggattgtaatgcatttttagacgtcagtcagcatgtctgaatatcagaaaacttccgtaaaaagcacatctacaagaatagcatgcacaactacgaaagtcaacgtgctataagccagtttttcagaaaaagttgcgccctttttttgtagttatcataaaggagatgacacgtttgttaatatattttttaacctttgttattggcgcgtgttgcgcctcttttttaactgtttgtgcttggcgttggccactcggtttatccatcacatggcctggttcacggtgtgacttctgccatcacgccctcgcttggtacgacttatgtccaattatcagttacctcattctcagagggcactgccgctattgtgatactcgaatccagcaccatttttttactagtgaggttattggcggcttgttagcgtgttgtttagccagtcaatatttcacaccacagattggctatttattgcttatcctttatttgttgagcctagtcgatattttccatacagctctatacccagttccaatggtactggcttttatgcctttgtttattgactactggccgacaaaccattggctcagtgccctattgattggcagcaccttatctgtcatcaactacttttcagatggcatcggtactggtgacattgaattattggcaattcttgggttgtggtttggattggaggtcaccctatccatgttattaattgcctgtctcctctgtttaatcaaatatctcattgatagtctccaccatccagttgtcctcgccttagtcggacgccgcccaattccatttgtcccgtatatcagctacggtgtcttaatcgttttgtttattgcaaacacataaaaaagggcctcaccatgtcggtgaggccctttaacgtgcaatttagagcaactgttctaaattggcactcagttattcttttgtttcttctttcatctgtgcttcgatgtcactgattgagtagacattttctgatacagcgccgactgtcttaggttccatatgacgatacttcgccataccagtaccagctgggacaatcttaccgatgataacattttctttcaaaccaagtaatggatcgctcttaccgcggatagaagcatccgttaagacacgtgttgtctcttggaatgatgcggctgataagaaactatttgtttccaatgatgctttcgtaataccaagcaagacaggacgacaagtagcaggtacgccaccgctaattaaggtttcgtggttacggtctgtaaattcactaatatccattaatgtaccaggtaagatttctgtatcacccggatccatgacacggactttacgtagcatttgacggaccataacttcaacgtgtttatcgccgatttcaacaccttgcatacggtaaactttttgaacttcatgcaagaggtagttttcagttgataagacgtcacggactttaattaattgtttaggatcaacagaaccacccgttaacttagaaccacgacgaaccatgtcgccttcgttaacgatgacgttggctgtgtaaggcacactatatgaacgtgtatctgtttcaccttgaacagtgatttcacgtgtatgttctgcagggttttcttccaccgcaacaacttcaccagttacttcagtgattgttgcaagccccttaggattacgcgcttcgaaaatttcttggatacgaggcaaaccttgagtgatatcttcaccgccggcaaccccaccggtatggaagttacgcatggttaattgcgtaccaggttcaccgattgattgagctgcgactgttccgactgcttcaccaacttcaacttcttcgccgttggccatgttacgaccgtaacattttttgcagacaccgtgttttgtgttacatgtgaagacagaacgaattgtgacttcttcaacaccggcatcaacaacagcttgagcaagttgttcatccattaattggttacgttgaaccatcacttcacccgttgttgggttaacaatggtcttcattgcgcaacgaccaacaagacggtcatacaatggttcgattaattcattaccttcgcgaattgagtgaatgagaagaccacgatcagtcccacaatcttcttcacgaatgataacgtcttgagcaacatcaactaaacgacgtgttaagtaaccagaatcggcagtcttaagcgccgtatcagtcatccctttacgggcaccatgggtagacataaacatttccatgacagagaggccttcacggaagtttgatgtaacaggaacttccatcatcccaccattaggagcagccatcaacccacgcataccagcaagttgcgtaaagttagagatgttaccacgagcaccagaatcagacatcattgagattgggtttgttggatcaaacgaatctgtgagtcgttgttggatatcgtctttagcatcgttccagatttcaataacgcgcgcatggcgttcttcatctgtaatcaacccacgacggaattgtttagaaaccgttgtgactttcttatgggcttcatcaacaatttcttgtttttcaggtaattgaggaacatcggcaaccccaactgttaaaccagcatgggtcgcttgaacgtaacctaaggtcttcatatcatccaataagtcagatgtccgttgaaccttatataccttgaagacttgcgcgatgatatcacttaagaagcctttcttaaatggtaaaatcactggggcacttgagaggtagtcatgaatatcttcaccgttatcgatgaagtatttatctggcacaccattcatcaagttatctgttgttggttcgttcaaatatgggaagccagttggcatgatttcgttgaacatcactttaccaacacttgttaccataatcttgtggcgttgttcgtcagggaatggacgattatccatatcaacaactgacaaaccaatccgactgtgtaaatgaacgtgacctgtttgataagccattaaaacttcgtttgtatctttgaagatcatgccttcgccgagactacctttttgttcaagcgttaagtagtagttccctaaaacaacgtcttgagaaggtgtaacgattggtttaccatcttttggtgccaaaatatggtgagcggcaagcattaacattcttgcttctgcttgtgcttcatcagataaaggtacgtggatcgccatttgatccccatcgaaatcggcattgtaagcttcacaagctaatggatgaagacggattgacttaccatcaaccaggattggttcgaatgcttggataccaagtctatgcaatgtaggtgctcggttcaatagaactgggcgttccttgatgacatcttctaaaacatcccaaacatcgtcatcttgacgatcaattttacgttttgcatttttaatgtttgaagccatatcgcgtttcactaattcgtgcatgacgaatggtttgaacaattcaagtgccatttcacgtggtaatccacattgatagaacttcaatgtaggaccaacatcgataacggaacgaccagaataatcgacacgtttaccaagtaagttttgacggaaacgaccttgtttccctttcaacatgtgtgaaagagacttcaatggacggttaccaggtccagtaactggacggccacgacgaccattatcaatcaaagcatcaacggcttcttgtaacatccgtttttcgttttgaacgatgatgcttggtgccatcaagtctaacaaacgtttcaaacggttgttacggttgatcacacgacggtacaaatcattcaaatcagatgtggcaaaacggccaccttccaattgaaccatcggacgtaaatctggtggaataactggaatagcatccataaccatccattcagggttattccctgatttacggaaggcatctaagatgtccaaacgacggatagcacgcgttctcttttgaccttgtgctgacttcaagtcttcctttaattcagcaacttcgccttcaagatcaacgtcacgtaacaattctttgatggcttcagcacccatcttagcgttaaaacgattaccgtattcatctaatttttcacgatattcacgttcggtcatcagttgtttcttttctaaggctgtatcgcctggatcaatcacaacgtatgatgcgaagtaaataatttcttccaatgcacgagggctcatgtctaagacaagacccatccggctaggaatccctttaaagtaccagatatgtgttactggtgctgcaagttcgatatgtcccatgcgttcgcgacgcacttttgaacgtgtaacttcaacgccacaacgatcacagacaattcctttataacgaattcgtttgtacttaccacaagcacattcccaatctttcgtaggtccgaagattcgttcatcaaaaaggccatcacgttcaggttttaaagtacggtagttgattgtttctggctttttaacttcaccatacgaccaactacggattttatctgaagatgctaaaccaatttgcatactttcaaacttattgacatctatcaaagggccgacctcctcataatttatagcacgctttattcagcagatggatctactgcatcagcatttgctgcttgtgctttttcagcttcttcttgtgcctttttggcttcttgttctttagcgtatttagataatgcatcgatgttttcgatatcatcatcatcgtccatatcgcgtaattcaatttcttgattatcgatatccaagaccttcatatccaagccaagtgattgtaattctttaaccaatactcggaatgattccggaacacctggttttggaattggttcacccttaacgattgcttcgtatgtcttcacacgaccaacaacgtcatcagacttgtaagttaagatttcttgtaaggtataagcggcaccgtaagcttcaagagcccaaacttccatttcaccgaaacgttggccaccaaattgagctttaccacccaatggttgttgcgtaacaagtgagtaaggtccgattgaacgtgcatggagtttatcgtcaaccatgtgggctagtttcatgtagtacatgacaccaactgacacacgtgtatcgaatggttcaccggtccgaccatcataaagaatgctcttaccatcagaaggcatgtttgcttctcgaacagcgtcccataaatctttatcttgcgcaccatcaaagactggtgttgcaacatggatgcctaagtttctagcagccatcccaagatgtaattcaagaacttgtccgatattcatacgagaaggcacacccatgggactcaataagatatcaactggggtaccatctggcatgtatggcatatcttcttcaggaacaacgattgaaacagtccctttgttaccatgacgaccagccatcttatcgccgacttggatcttacgtttttgtgtaatgtaaacacgaaccatcatgttaacacctggtgacaattcatcgccagcttcacgcgtaaagatcttaacgtcctggataatcccgccgccaccatgaggtactttcaatgatgtatcgcgaacttcgcgagccttttcaccgaaaatagcgtgcaataagcgttcttcggctgataattctgtcacacccttaggcgttaccttaccaactaaaatgtcgccatctttgacttcagcaccaacacggacaatcccgaattcgtcaagatccttcaatgaatcttcaccaacgttaggaatttcgcgtgtgatttcttcaggtccaagttttgtatcacgagcttctgattcgtattcttcaatatggattgaagtatataaatcttctttcactaaacgttctgaaagaacgatcgcatcttcgtagttatacatattccaagtcatgaaagcaatcaatgggttttgacctaaggctaattcacctttttccatagctggtccatcagcgataatttcatcaacatcaacgtgatcgccttttgcaacgattggacgttggttgtagttcttaccagcatttgaacgacggaatttcattaattcgtacgtatctaatgagctgtcttcacgacgaacgcgaatcactttcgcatcaacgtattcaacagttccggcatgttgtgctaataaagcaatccctgaatcgtgggctgctttatattccatccctgtcccaacaagtggtgcatgtgggtcaactaatggcacagcttgacgttgcatgttagcacccatcaaggcacggtttgaatcatcattttccaagaaaggaatgcaggccgtagcgacagcaactacttgcttaggcgaaacgtccatgtaatctaacttgtcgattgaagtttcaatattgtcatctttgtaacgtgctaaaacagtatcatcaacgaatgaaccatcatcgtttaatggtgagttggcttgcgcaatgacatagttatcttcttcgtcggctgttaaatagtcgatcttatcagtaacatcatgcgtatcccaactaacacggcgatatggtgtttcgatgaagccgtaacggttaacaacagcgtaactagccaaactgttaatcaaaccgatattagggccttcaggggtttcgattgggcacatacgaccataatgggtatagtgaacatctcgaacttcataaccggcacggtcacgagtcaaaccaccaggtcctaaggcagatagacgacgtttatgcgtcaattcgccaaggggattggtttgatccatgaattgtgacaattgtgatgaaccaaagaattccttaattgaggcaacaactgggcgaatattgatcaattgttgtggtgtcacggtgcttgtgtcttggattgacatccgttcacgaaccacacgttccatccgtgataaaccaattcggaattggttttgtaacaattcaccaactgaacgaatccgacgattccctaaatgatcaatatcatccgttgaaccgagaccttcttgtaagttaaagaagtagttcattgaagcgatgatatcagcaggaataacatgcttaatcttggcatcgatatgaccgttaccgattaagttgatttctttatcaggtgttttttgtgagtacactttgatcacttggagtgtcattggttctggtaagacaccttcatcagatggttggtaagtaaccgtcttgaagtcttctttgtctaagtatggtgccaaagcatccatcacttgacgatcaacaactgtatctttagcagcaatcacttcaccagtatcgggatcagcaagtgtttcagctaatgtttgacccaataaacgcgtctttaagcttaatttcttgttgatcttgtaacgaccaacagcagctaaatcataacgtttagcatcgaagaaacgtgcataaagtaatgaacgtgagctatcagctgtcttcggttcgcctgggcgaagtctttcgtagacatccttcaaagcttcttctgttcttgagtcgtcagtattcttatgaatatctttttctaacgtcaacattaatgaatcgttgtcgcctaagatatcgataatttcttgatcagaaccgtaacctaaagcacgaactaaaacagacatcggaatcttacgtgtccgatcgatccgaacgtatgcaatatccttagcatctgtttcaaattctaaccatgcaccccggttcggaatgacagttgtaccataagttgtgcggctgtttttatcaacagcgctgttgaaataaacgcctggtgaacgaactaattgagaaacaattacccgttcagcaccgttgatgatgaaagtcccttggtcagtcatcaatgggaagtccccaaagaaaacgtcttgagatttaatttcaccagtttcatggtttgttaatttcaaagtaacgtgtaatggtgctgagtagttggcatcatgttgtctagcttcttcaaccgtgtatttaggttcaagaagttggtaatcaacgaattctaatgataagttaccagcaaaatcgtcaattggcataatgtcatcaaacatttcacgaagcccttcgtctaaaaaccattgataggaattagattggatctcgatcaagtttggtagttctagcacttctttaatccgtgcgtagcttctacgagtacgatgtttaccgtaattcactaagtgtcctgccaaattgttcacccctctataagttttccgcagcctcattgttacaaaaatatgacaaatgttaagaaaatattacatcgccattttttggtaattttgagcagaaaaaaaacaaaaacagttattttaagctgaataaatcagactaactatttttgtttttcatgaataccgtgctggacaatagatcagcacaataaatttttctacggattttcgcagttactgtataatatacttcttttactactaaaagtcaataatctgcctctggttattcatcccttaatttagcgtccataatgttcttttacttccatataatagcccgacttttctgcacattcaattggcgctaaaatagctcgattggcacaataagcagccatacaatcttcaagcccctcacggaatcatttacaaactcgcgacttatcatttacgttttttacacgaattagcggtcaatctttacacgacgtctctatactgaacttgtacccttaaatcagtcctcaggaggaatcattatgaaacgcattagtatggcattactcacagttggtgcggccgctcttttattagctggttgtcaaggccaatcaaaaagtgcaagtcaaagccaggatcaaggcgctaaaattactgcagttggttcgacagcccttcaaccccttgttgagcaagctggcgatcaatatcaaaaggataaccctaaagtcaacgtcaccgttcaaggtggcggttcaggaactggtttaacccaaattagtggtggcaacgtcacaatcggtaactcggacatcttcgctgaagaaaaagatggtatcgatgctaagaaacttgttgatcacaaagttgctgtggttgcaatcgcacccgttgttaataaaaagttaggcatcaaaaatttaaccagtgcacaattgctaggcatctttaaaggcgaaatcacaaactggcaatccgttggtggtcctaacgaaaaaatcaccgttatcaaccgggcccaaggaagtgggacacgtcaaacgtttgaaaaattaggtcttaaaaccgacaaagttgttaccagccaagaacaagattcctctgggactgttcaaaaaatcgtcgaacaaacgccaggcgctatcagttacctcgccttcccatacatcaaaggtaacttgcaagccgttaagttaaacgacgttgagcctaccgaaaagaacgtttcaaccaatgcatggccaatctggtcttacgaacatatgtatactaagggcgcacctaactatcaaacagcccgtttcatccacttcatccaatcaaaagacgttcaaaagacaatcgtccctaaactgggctacatcccaatgacgcaaatgaaagttgagcgccacgttgatggcaccatccaagatcaatagtttccagaagtcgcgctaaactgcgcgactttttaattggtatatactaataaaaagcttttaaacaaagtaatttgcatttatatttatgattggtataatcgaactattagtttatcaaaggagtttggtgaatgattaacaataaaatgaaaacgttatccgaaaaataccccactaaaatggcaattacttccgaaatcatcaacttaaaggccatcttgaacctccccaaacccactgaagccttcatgagtgatttacatggcgaatatgatgccttccagcatctcattcgcactggcgcagggaatctccggcaaaaaattgcagaggtcttttccggtgaaatgactgaagacacaatgcaggcgttcgcttttttagtttactacccaaccgagcggcttgcactcaaacacgcacaactatctgctagcgaactcgatcagtggtacctcaccacttttaaacggttaatcgacctcttaaaatttgtctccacaaaatacacacgctcaaaagtccgtaaagcaatggcgcccgatttcgtctacattaccgaagaattaatgtacggcgatgtagctaacagcgataagaaacgctacttccaagaaatcacgacgtccatcatttcgatgggccaagccgatgccttaattatcgccaccagtcatacgattcaacgactagtggttgatcattggcatatcatcggtgacatttacgatcgtgggccgcgtcccgatctgattgtcgaacaactcaccaagctccccgcggttgatattcagtggggcaatcatgatattctctggttcggcgccgctagcggttctcaactatgtatgctcaaccttttacgcatttgcgcacgctacaacaatttagccatcatcgagaaagcttacggaattgaccttagcgaactggttcagtttgcccaacgaacttatcagcccaatcccgccttcgaaccaaaggttgctgccaatcaacccgcaatctcaacagctgaaaagaaaagcatcaaccaagtgcaccaagccatcgccatcatgcagtttaagttggaacaaaccgtgattaaacgcaatcctgatttcaaaatggaccaccgcttaaccctcagccatgttgactttgaacagcagacaattcatctaaatggtcataactatccacttgataacacctgctttcaaacagtcgaccccacacaccccgaaatattaacttccgatgaagcagccattgttacatcattgctaaacacgtttacccactgccaaaaactacgcaagcatctccgttttttaatcgacaacggtaacatgtaccaactctacaaccagaatctcctttttcacggctgtattccagttgatgaagccggcaacttcctcacgttaaccctcgctaaccgacaatacgctggtaaatcattactcgacttcttcgatcaccaaattcgaatgagcttcgaccacccgctcaatcaagataatttatccaccgatttactctggtacctgtggacaggaccgctctccccactatttggcaagaacgcgatgacgaccttcgaacgctacttcagcgccgaccccgttttacacgaagaaaagaagaacgcatattaccaactccgccatcaggaagacttcattgagaaactcttgttggagtttggcttaacgccagaaacggggcacattctcaatggtcacacacctgtcaaaaaaggccacaatccaatcatggctaatcgcaaaatgatcgtgattgatggcggcttttcaaaagcttatcaccacacaactggcattggtggctttacgctcttgtacaattcgtatggaatgcagttagtcacccatcagccgttcaccacacgagccaatgcaattgccaagatgcaagacattatttccacgcgtcgagtgattgatcaagttagtcaacgtcaacgtgtcagtcaaacgaatatcggcgctgcgattaaaactgaaattgaacagctcacgacccttttagggcaaaaaaataaggtgtcagaccaattggtctgacaccttatttacgtttaaacagttactttatcagtcttactggtaatggtaattttacctttagttgcgccaattgtcaccggtacacccatcgtaatctcgccagcaagcaacgcttcactcaactgatcttctacttgggtttgtagcgcccgtcgaattggtcgtgccccatattcaggatcgaacccagctttggcaacaacatccatcgctgcagctgtcatcttgatttgaatcccttgttccgctaaacggcccaagacattcttcgccataatcttcacgatttcgcgcaattcaggttgtgttaaggaatggaagacaaccgtttcgtcaattcggtttaagaattctggacggaaagctttcttcaattcttccataatgcgcccttgcattgctttataatcagcagttacatctttaaccccgaacccaacggatttatcatcacgtaaggctgtcgcacctaagtttgatgtcataatcatgatcgtattacggaaatcaaccttacgtccttttgaatcggttaaatagccgtcatccaagacttgcaacaagatattgaagatatcagggtgagccttttcaacttcatcaaataaaatgacggaatatggtttattgcggaccttttctgttaattggccgccttcttcgtagccgacatagccaggggccgccccaactaaacggctcgtgctgtaacgttccatatattcagacatatcaacccgaatcaagttgtcttcagaaccaaacatggcttccgccaatgctttggctaactctgttttaccaaccccggttgggcctaagaacataaatgaaccaattggtcgttttggatctttcaaaccactgcgcgcacgacgaatcgcacgtgaaacggcagaaatggcttcttcttggccaacaacccgtttatgcaagactttttcaagttgcatgagacgttcgctttctttgcgttgcaactgagtaacaggcacaccggtccattgcgcaaccacttgagcgatgtcttcagcagtcacttgaatgtcactgcgaacaccgttttcttgttcggcagcttgtaacttggcaatcttggccttagtggttacttcttgctcatgaatcgtcgccgctttttcaaaatcttgcgcgcgaacagcggcttctttatcgtcatttaaagtttgtagtttttgttctaatttatccaacggtgtcttctggttaacagcatccaagcgcactttagccgtcgcttcatccattaaatcgattgccttatccggtaagaatcggttcgtgatgtagcgatttgataagacaaccgcttcatgtaaagcttcatctgaaattgcaatcccatgatgagcttcataacgtggacgtaatccctttaagatttgttccgcatcttctggcgttggttcattgaccgtgacggtcgcgaatcgccgctctaaagctgcatctttttcaatgtacttttgatattcatctaaagtcgtcgcaccaattaattgtaattcaccacgcgctaatgctggtttcaagatattagaagcatcaattgccccttcagcgccacctgcaccaatgagggtgtgtaattcatcaataaagagaatcacttgcccatctgcatagatttcatcgataatcttcttcaaacgatcttcgaattcaccacgatactttgtcccagcaaccaatgaccccatgtcgagcatcatgagccgcttttgctgcatgtcacttggtacatcgccattgacgatgcgttgcgcaaaaccttcagcaatcgctgtcttaccgacaccaggttcaccaactaagacgggattattcttcgaacgccgggctaaaatctgcacaagtcgccgaacttcttcatcacgacccacgaccggatcaatttgattgtcacgagcaagttgtgttaaatcgcgcgctaattggttcaacgttggtgtcccagtttgatcggcattattcttagctgctttagcccgttttttagcggttgccgtatccacacccatcttttgaagtagtagttggcgtgttttagctaaactaagtcctaagttcaataagatccgcgcagcgataatatcatcatcacgtaaaagtgctaataataggtgtgctgtgccaattttaaccgaattagcttgttgcgcttcgacccgagcaatatcgagtacttgtttggctttgggcgaatatggtaaataaccgccaatgccagaagcgattacagcatcgccatatccggttaagcgttcaatttcttcaaggacatcggtcgaattgacacctaattcgcgtaaagtagtcccagcaattccctcattttctaatacgattgctaataggagatgttccgttcctagtgcatggtgattaaatttctttgcttgttcttgtgccatcattaagacgttttttgcacttggtgtaaatagattattcatggataatcccccactctttacttaatttcatatcgtagtcgttctaacactgcaactagaatctgtgctcgaagctgctcttctaattgtttattattaaccgctaatgtctgtggactcgttgccgcgagtatcaaattgccttccttttgcgaaagaatttgttcatcatatagtttctggataatggctaaggtgtccgcctgggaaatctgcgtatcaacattttcaattaacgcttctaaaaagtcccgatcatcgagaaattgaaccttgacgatccgaatataaccaccgccgccacgtttactattcacgacataaccgcgctgctcagtgaaccgcgtattaatcacatagttaatttgggacggcacacaattaaaaagcttagcaatttcggagcgtctaatttcgatttgttcattgtcagccagtatcttttttagataggcttcaataatatccgagatgttctgactttgcaaacatatcagccccttcatttagtcttctgcgtttttcagtgtcaaaagtttaactttgactaacgttgactattattataacgattatcagtacaaaatgaaagtttactgacttttagtagctaatcaattggacgcacaaaaaaagacttgtcatcaacaagtctttgagagtcgggaaaacaagatttgaacttgcgacccctacgtcccgaacgtagtgctctaccaagctgagctacttcccggaaactattttattacgggtacaaaaaaagcggaagacgggattcgaacccgcgacccccaccatggcaaggtgatgttctaccactgaactacttccgcattttttattaatatttttgtatccagcattgatttgatactcttctaaaaccatcgttttttcatcagaatttcattttattcatagcgccattcgacataatcattatcgatgtgataataataacatttctggtactgatcagatttaacctcttctgaaaattcaatgagaaagagtttcacattcaatgtcgccaccaacctcaccaattcattaaattggttgatactgagatagtgcgaaacgttgatcaacgtgattatttttgattcatttaactctactgctgtctgtactatactctcaattataccatatgggtcatgttggacgacagtcgaaaattgtaaattatagaacttaatcattctttgaagatcccattcctgattgacatctaaggtcaattcatacataaaggccgcatccaaaatcgttgaacgaatctcactatctaactgagttaatttctggcgctgctgatccgttaagtcggcggcgaattttttaatcaaccgattttgaaatagatgattcaaattaattgctgccacatccccaccccaaataacagcctttgaataatccattaattcgtattgatcattgctaaatttaacggtctcttgtgcgccggacattccaataatgagtttggtatacacttctggactacttgtactgcaaaccgttattttattattctgaacgctaaaggggtggtatggataaaaagtaatgttcatagaattaacgtcctctcagcagaattacggacgtcatcactcgattcgcccactaagaaatgcattttattatattgttgctcagtaaccatcaacgtttgtactaagcctgcaggcggagtaaagccagcaattcggttctcgataaactgcgccgattgtttgctgacacaaactcgaacataaacagaatattgaatcattaaaaaaccttcgttaagcagcgcttttctaaaatgacggtatgccttgcgatcctcgctcgtttcaactggtaaatcaaacatgactaataagcgcattattcggtacctcgtgagtcattaccacctttacttcaaactcttctttcggagttgtcatgaatttcaaacaattctgtacgtgtttagtgagtgcgtttctaagaattgtgatctgtccattatattctagctcaagattcagtaactccactaaaccaaatttaacatcaggggttaattcattaaacttttgatgtgccacccaataatcaatcactggtcgaaaaggttccattagatcggaacccaaattaaaatcactgacgccattgtgatgatgaatgccaaactgtgttaaatagccattacaaacaatttcgcgattaacggctgataacaacaaactataaccataattaagggctgcattaatgggactgtactccgttcgaacaaagtctttatcaaaaactaactgaaaatacttgcgcgcaatcacggcttcccgatttgttcgatcagcaaataccattgcatcagcttctgttgttaagtcttcaatatcctttcctaacaattgtgcacattgaatttgcatcgctattttggcttgaataatcgccgtccataaggtttctttcaaccccgttccccattcaacctgttgctggatcgacgcgagactacgatttcctggataatccgcaattgtttcgcaagttggattaccgtctttgcctgtaaaaataatcttagcgccagcttcactcaactcagtaatcgccgatgccgttaaaacggcctgggtagtcgcaactaacaaaatttggatatcatcaattggtacttggtgtgttgcatcttttgtctggacaataatcttccgtccagaataagaaacctttgcatgttgtgaaatcacaactgttcgccaactcataaaaatttaccccctacatccttgttttcaaaatgataacatgctataatgctgttgttgagcttgatacactcaatcgaaatactcattgatttgatactctgagttaaaatcaaacaaggtcttcggaccaagttttctattctaagcctcttatgaggcctttttttatgccttcaaaccaaaaagctagcccatcattacactaatgacaggctagctttatttatttataaatcccttaaagctactcgtcgttcgaataaaccggttggagattgatagataatttgggtatcagccgacagtgtaattcctgtggattgctgtatcattccaaatggcgtggtcattttcaatactttaagatcactcatcgcagcatttgcatgtaatccaattagaattctatccaatataacctgttgcccaacctgcaccatcttattaccatcccattgactcttccatggtaacttcataaaggctgctttacccgtagataatttagctctgaattgattagtatcatacagtgggaaatagtgcatcacttgatctaagatttcatcataaacttgttcagcaagttcttcagactgtgttaaaggtagcgcgccatttaataacttaacagccgttttatcaagaatcaattcctgctcattgtgtttatacgtcgcagagcccaatgtcaattcttgaccattatcgaagaaacgttgattgattaggatatgtggtgcaatgacttcaaagtcttcgaccactttcacaatcgttcctttttgttttttcacttttgtaaattgcggactaattttttgctttaagaatgccttttgtgagtcttcatccgtcagttgtttaagttgcgctagccaacttgtctcaacaccacagactttatagagatcgccctttttatttttaatgcgtacaatacacatgtaggcaacggtcttccctgagtacccaccatagagtgcagttggtcgatcttgtttagcgggaatcaattgcttcccgccctgaccacttgctttatcatctttagccgcatagagcgtttgattaaatagtgctcccgaattttcatgcactccgcgggtcactagaatcttcttaaactgatatattttattcaagtaagctagaccggattctttatcccaaataaccgcttcagtattttcatcaaccaattcgtctttctttagaccatttagaaaattaaagttacgccacttatcttgctgacttgccttctgatactcaccgtatacaaaataaggttttaatttaggatagcgcttcaatagatacagaccaacgaatgcggtcagataagcatcgaatgcatgatgatggttatttagattacgattcttcggaaaatcgaattctgttcgcatttgatgggttaacccactcttaacagtaattaactcaatgttatcttcaccatactgttccatcaataaattcgttgctaacttaatgacttgacgtgtttctactaattgccgattaataaagcccttcatggcgtatttactgatatgatccggatttaacgttaaattatcatattttttcttggtaattaacccagctcgcaacatctgttcccattgaatctgcatcttttgtccaagttcgacacttgtaaagtcagtcggtaattgatctgctttactacggttcattttttgagaaactaaaactcggttatctaacgaattatccttaataaacgattgtggcaaaatatgatcaatatcgtacgtcgataaacgatcaatattcaacgaatcacccgtatacatatcccgaccaccctgcatgaagtacaagaataagcgcgtattgctcaatgcagaattcgataaatccttaagttcatttctgatttcagtattatttagcaattcattgctgatattttgatagacttgttcaacttggcgcttacgttgcaccgaaagtcgtggattcacttcatcttcgcgcgcaaattcaatcaatatccgttctggcgcctggcctttcatggccttttgaatgtcattgacaacaagcagaatctggcggagcgcttttttattctgtggtgacgtatataaatcattgataacatcttgtacatcattttcagctagcatcatttgattagcttcagtaattaatttatcaaagtcttcagagtgcacaatccgcatgaagttatccgttgtatcccagagtaagtccataattcgttgtccattcgcattgacgatttgcgttaataatttagccgacaaacgaccccaaccgcggtagcgtttagcagctaattgcacacgttgctgatccgttaaccaatcgatttcattcaatttggcgctatatattttgccgtcttcaaaaatcgttgaccattcaatacatttttccaaatcggcttgtttatcaacatcatcaaccgcatctccaacaatcatctttaagtcatgatacgtgcttaatcgactattaaatttgttctcatcggatagaccagtaattgcgggacgacttgcatagcgcttttctgataccaagtaatcctgaatatttttcactgttacacttattttttgcataaataaatccgtaaatattgcttgtttcaactccgtcgtaatcggttggtcatcaatcttaagtccgtttaattcattcaacacttcaaaccgttgataaattaagctctgtttagggagtacatcttcagccaataaataagtatcagtcgttgtcatgcgcttaatgaattcattagcggatgcttgacggtccactttatcatcgaagttccacggtgtaatccggccttctgctttacgaatcatccacgcaaatttcgcatcggagctttgtcgttgctgctcagccgtaatcaggggccccacatagtatggtactctaaaggccactaattcgtccaatttatatttagcgactgtttgccgtttagaattgggattaagttccgctaaccagggatagtattgttgttggttctcaataatccggtctaattcctgttgatgtagttgatgcgggattgccccattatctttggtccgttgttttggcataaattgatcaagttcaattaattttttaatttcactcacaatcggatgatctgggttgttctttaaggcttttgtgatatctccgtaaaaatcttccttcgaataggccttcgtattttcttgaccatcaacatattggtcataagcctgctttaatctctgtcggtctccaggtgctaacgcttcccgtaccgcttttagcatttttaaatgcttttgatgatcgtcatacttcgtgatcatcgcttgcgacaatgattgattttcgggaacgattcccgccaatagaacaccagaataaagttcctgtaggctttcgataatttgatgggcattatcatcaagactactctctaacttgaccatttcttcatcaaagttttctgcattaaaagtgagtgtccatgctttaacatcttcggcttcgatcccagtaagcacattaaacttcgcttttaaccccaagattgcttttaataattctgtcgcaatcgccttattctgcttttcaactgccttattcgtacttggcgtataaatcagtgataatgcttgtctttgccgattgctagcactttgttgattatccaataagagcgctttgacctccgccaatttatccgtctctagttgaaagccagattcactgaacaagtcagcaaaaatcgtgtttagtctgtcaaaatgagccactaaattaatttcgctactcttaaaggatgagacgggcgcttcatttaaaaagtgcccgcgatacttcacaatatgatgcatcgctaaataaatctcgcgaatatcaaattgacgtttctcggtcattagcttatatcttaaatggtaaatcgttggataatcgtcatagaatgcccgatctgttcgatcattaaataaacttgtctgtggatataactttcgctgatccttcggacttaggtttgattgtttttgccgcaagaaaaaagtatcatcaaccggcgtgatatagggttcaaagatttctcttaacaatcctaaccgccatttacgtcgttttaatcggcgacgtgttgttctaaagctgcgccgttctgcggctgtttgtccttcatcgtataaacgaaccccataaccatatttacctcttacactgaccaacttactttggtcatcaaccactgaccacccaattgaactagtaccaatatctaaaccaatattatacggacgactcattcttactccccctaaaagtttatattcaatgatagtatatccaatttaacccgctttttccaattaaattaagaattacacatgctaacagcaaaaaaagacaagtcttaatgacttgtctttgatcattattcaactggtaacactgcgccgtgccatttattcttaatccattcttgcgttgattttgatttgagcgctttaacgagcttcttgatagctgggttattgcggtcttttttatttgtcacaacaatgttggcaaatggcgaagattgcttttcaagggccacagcatccttttcagggttgagaccggcttgcacagcatagttcgagttaatcgccactaaggtgccttcatcattcttcaaaagttcaggcatgagttttggttcgaatgtgtactcaaacttgaggtgtttgggattgctagcgatgtctttaaacgttgcgttttcagcatttacgcccgatttcaaggtgattaagccaccgtcttttaaaattgttaaaacacggccccagtctggctggctgcttgaaactaatactttcgcacctgatttcacatcactcaattttttaacttgtttactgtataagccgagcggttctaagtgaatactgccaacactgactaagtcgtagccgttatctttattcgccttcttcaaaaagggtttgtgttggtagtagttcgcatctaattcgccactcgctaaagctttattgggtaaaacataatcgctgaagacttttactttgaggttgatgccttcttttttcaactccggttgaacgtgtttcaaaatcgcggcgtgtggaattgcggatgccccaacgacgattgtgttgctgtctgacttcgcttctttgttaccacaagcggcaagtgcgcccgctaataagaagactgctgctaataatcctaaactgtgttttttcatgaaaactcctccttttaaattaacgatgatcaatgtgttgaacaaccaagtcgcccgttttttgacaaatgaagacgatgattaaaataatgacggttgcgactaacgtaatcgcattttggttagcttggaacccatcttggtaagcaagatttcccagtccaccggcaccaatcacccccgccattgcggtataaccaacaagtgaaattgcggtgacggttaagccggaaacaagcgccggcatgctttctggtaaaaggacttgccagacgatttggacttttgaagcgcccattgaacgggtggcttcaagcacaccgccatcgacttcccgaaaagctaattcaacgagtcgtgcataaaagggcgcggctgagatgattaacgctggaatcgcagctttcgggccaatcatcgtgcccatcaagccttttgtcaatggaatcaacaagacgattaaaatgatgaatggaatggaacgaaagacgttcactaataaagccacaatgccattcaacagccgattcactcgaccaccactcgcgtttgtttgataaagaactaacccgagtgcgaatccaagaactgccaccaataaaacactgacaattgttaaccaaactgtttcaaaagttgcttgccacatacttggccagttcacttgcttaaattgaaaataggattgaaatccgtttacgttatccatgacgtaccacctcaacttcgattgtttgttgtgctaattctgcaaggactgcctttaaatcacttggattagcttgaatttgaatgtataaatagccaagtgcgccattaatggtttgttgtaaactcccactgatgacactgatttcgactgctgggtattgacgcatcaagcgaccgatcaccggttgactcgattgttcttcgttaaatcgcagttggacgattgtgccatttggaacccgttctaacagttgatcaatcgaagcggccgtttcacttggcgacaccactaaggattcagcaacaaatgccttggttgcagccatttgtggtttttcaaagatttcgtgcacagtcccttcttcgattaaccgcccattttccatgaccgcaattcgttggcaaatccgccgcaccgcatccatttcatgggtgacaagaacgattgtaatccccatttcacgattaatcttagccagtaacgttaagattgaattcgttgttttcggatcaagggcgctagtcgcttcatcacataacagaatcttcgggtcactaatcaaggctcgtgcaattgcgacccgttgtttctgaccgcccgatagttcgcttggataggccgcttctaaatgggtcaattcaacaatctttaataatgcgcgggctttgatttgtcgttctgccttaggtaccccggctaattttagtggcaacatgatattttctaacaccgtctttgaccagagtaagttaaagtgttggaaaatcatgccaattttctgccgaatcggccgcattgcttgttcgctcaaccccacaattgactggccctcaacgagcacatccccagtcgttggcttttcaagtccattcaagagtcggatcaacgtactcttaccagcgccggaataaccgataatcccgtagatttcgcccgcttcaatgttcaacgagacatccgttagtgcggcgaatgttttttgttctcgctcaaaggttttacccacttgttttaatgtcaacatactaatcgctccctcttcttttaaaaaatgccaaaaaaaaatccttcctctcaaataaatgagagaaaggacgctaaatgcgtgttaccaccttaatttacgattacctcacagtaatcgccttacaaagtacccgattgatactcgttcgctatatcgggcaacccccgcattcggctcagttaaaccttaccaaatgaattgctcaaagaccatattcatctagctttcacattatccgcttgcacctgaccggactctcttaaaatgctactgactaaattactcatcttttcatcgcttgtattaagtagtacctatcataattaaagttcaattaaaagtcaagcaagactattcaaaaaaatcagattattgtttaagtaatggcctaatcgacccgaatgtcagcaatccacgcatctttttcgttatctgcatttaataattccggattatcagctaacggtgtgttgacgtttactaattcaccagctagtggactgtcaagatcttgtaccatcttctcagcttcaatggccactaaggtttcattagccgtcaatttttgccccacgattggaacatcaacaaacttgattaacccaaactcattttgtgcggctttggtgatcccaattcttctaatcgatgctgcaatttcctctgtccaaaaataatcattattattcatcgtcatccgtcattcactcctagaaagtatcttcagcttcactgaacatgtaactcttataatggtaccgcatcgacatgataaacccaacgccaattaggttccccaataatgacgagcccccttgtgagatgaacggcaatggaatccctgtcaatggtaataaaccaacgctcatcccaatgttttcgaaaacatggaataagatcatcatgatgaccccagttgagacatacgcgtaaaattcattcttcgtatcaaatgtgacccgaatcatttggtaaatcaacaagaagtacaaaagaatcacaaaacatgaaccgacaaagccgaagttctcaccaatgacagagaaaatcatatcggattcacgtactggcacatggacttgcacttgattgaagcctttcccaaatagctgaccagacccaatcgcttttaaactctgcgataattgtaaactggtactggcagtattatcaaaaggatgcagccaagcatcaattcgattgaattggtacgttttaaagcccagatgcgtcaagattacccggccaggggtcgtcgccgctagtgtaagggccgtgcccccaacagcgactaagacagcaatggctggggctaaaatcttccaggtcacacctgagacaagcacaatcccacctaagatggcaacgaacactaataaggtcccaaagtcattttgtaatttcaataggaccatcactggaagtgtccatagtaacattcgtccaagtaacatccaatccgtcttaaccgtgtgttctggataagccgtattgtgttgagtaacgaccctgcccaacatcaaaatatatgccggtttcatgacttcagatggttgaaatgagattggtccaagagagaaccaactctttgccccagtttgcaaggcgactgcccgattataaaagattaaaacggcaatcaagaggaaaatccctaacccataagccagtggtgcaatccgccaaagttgttctgaatcaaactgcataattgcgacaatcgcaattccaccaatcacgtaccatgcagcttgcataataacggctcgagttgaactcgcacctgatgtatcatgtgacgttgccacatagattgacatcaagccaatcaacgctagcataaagactgaaaagacgattccataatcaactcgcgaggaatcttctgttgtttctacttcctttggcatgctaagtctccttcaatcaattctgctctcattatataaataacccggccagaattctgccgggttactgtaattctaattaattcttaagaattaaccttggtgtaagtggtactcccgtagtaattcgttaactgcatcgtcgtgggtcttagtaatgatactttgaccagtcccttcaacagttgcttcaaaacgtttcttagcgctatcttctacaatcacgccaatttcatttttgccgaccatgacgcttgtcatttcttggccattacgtttgatgtcatcaattgtgacagtaattttttgttctttttttgacatagttatgttgaacccctaacttctttgacttacttttgtgactcgtcttgctgtcgattgcgcaaaacggtgaaatgatctggtactggatcatagccgccccgtacaaacgggtgacaacgcaatatacgaccgatgcccatgattaaacccaaaatagcaccatgtttttggattgcttgaatcatgtaactcgaacatgttgggtaatatcggcaactcggtggtaataatggtgaaatccccttctgatagaaacggaccaatccaatcaatattttccgcaatttatctacctcactttagcgcatgctactgcaagaaattaataatatgactccatgtactaggcaagaaaacggcaaatggattctggccgccaattgcaaaaccaatcatctgaccaactaataacgcaataattatgagcacgaaaaccaataaaattttctttaaaacgggtttgacgtgttcgtcaaaatttgattgatacacacaatcacaatccttctttaatagaatgcggcttaataagcgcgtttatgttcaatattatctaataagatgccagtccctaaagcaacagcatccaatggattttctgctaagaccaccggaaccttcaaatgttctgagaataagctagcgatattgcgtaataaagcaccgccacccgttaacatgattccccgatcaataatatctgcagataattctggtggtgtcacttctaacacttctttggcagccgcaataatttccatcattgtttcatgcaaggctgattcaacttcatctgcactaattgagacagattgtggtaacccacttaccatgtcccggccacgaatctcaagtgactcactcgcatcggcatgccaaacgttaccaattgttaacttaattgtttcagccgtatgttcgccgattaatagattatgtttcttcttaacgtatgcggcaatttcactattcatcttatcgcctgcaagacgcaatgaacgacttgtgaccacttcacccattgaaagcacagcgacgtcactggtcccaccaccgatatcaataaccatgttaccgcgtggttgaaaaatatccatgccagcacctacagccgcgacttttggttctaattccaagaagactttgccgccacctgatttttcagcagcttcaacaattgctttttgttcaattgatgtaatatttgttgggcagcaaatcaaaatattaggttttgataggaagccctttacatttaatttattaataaaatacgctaacatttcttctgtaatgtcgaaatcagcgatgaccccatcctttaatggacggacagcgtggatattgccaggtgtccggccaaccatccgatacgcttctgagccaactgctaaaacttttttggtttgggtatcaatcgcaacaactgaaggttcgtttaagacaatgccttttcccttaacgttaattaagacgttggcagttcccaagtcaatcccgatatctttagccatttggtgttgctccttccgagaactatattcagtaaatcattataccataagacaggtacctttagtatcctgatttggcaaaataaaaaagcgacgtccgctgaaatagcaggcgccgccagtctgttttatgcacgttttgcttgtttaatccggtgaccggcagcatcaaaatcagctcgactaatatgtgccccaagtgcccgtaatttttgatggaaatgatagtaaccccggtccatgtattgaaggttcgtaaccaacgtttcaccattagctactaacccagcaatgacaagtgctgcggcagctcttaaatcggttgcagccacttcagccccattgaaatgtgtatcgccataaagcacaactgattgaccttcaatttgataatccgcattcattcggcggagttcttccaaatgcatgaaacgattttcaaataccgtttcggtcataacactcgtcttcttagcaagtaattgaagtgtcgtcatttgtgcttgcatatcagttggaaagcctggataaggtagcgtcttgatattacatgcctttaattcagcgggaccaataattcgaacaccagcttcttcgtcaatcacttccgcacccatttccactaattttgataggagtggtttattgtgttcagcaatcgcttctttaatcaagacatttccttgtgttgccgcagcggctaccatgaaggttccggcttcaatccgatcttgcacgatactgtgatccgtcccgtgtaaagcggttacgccttccacccgaattgtctcagttccggcgccaaaaacgttcgcacccattttgtttaagacattagcaagatccacaatttcaggttcacgagcaacgttttcaatcaccgttgtcccttcagccattgtcgcagccatcatgatgttttgtgtcgcaccaacactaggaaaatctaagtaaatattagttcccactaggcgttctgctttagcttcaatgtaaccatgattttgatgaatggttgcaccaagtgcttcaaaacccttcaaatgtaaatcaacaggccgcgaaccgatagcacaaccacctggcatcgcaactcgtgcgtgacctaagcgcgctaataacggccccatcacaacgatggaagcacgcatttttgaaacatattcaaaagctgcttcaaaattcaaatcaccactggcatcgattgttaattggttccgttgttcatcaaactcaactttagcatctaaactctttaatacatcttgcatcatgaagacatcagataaaataggaacgttcgttaattgaacgggtccgtcggttgctagtaaggcagccgccataattggtaatactgcgtttttagcgccttcgatttgaacttcgccaactaatcgttgaccgccttgtataatcaatttttccaagagtttccctccgaataagactgctagtttatgggactaaaaaaatcacatttttagcctgcgcgattatttctaaaaagaattggctaacggtgtagcccatcacaatagcgagaaatactatgacaatctgtacttgacggatatgattcggtttgaaaaattgctcaaaccggattgattgtaagccataaaaactgattaaaataaaaccaatatggctaataattgaaataactgcctgtaacccgattgattgcacttaaataacgccccttttgtgatatgcaaacattgtaacataccgaaataggatttgtctgcccaccagactgaatcttaagaaacaaaaaaagccttaaaccattcaggtttaaggctttttgaatcctacaataagtgattcttaacgttaatccggtttatcgcacgttgcagtgcaatttgagcccggcgtaattcgtcagtatcattatgttcggacgctgttttaattgcgttttgagcacgttccttggcactttgcgcacgcctaatatcaatatcacgcgcccgttcagcactatcggcaacgattgaagcaacgttatggctcacttccatgaacccaccattgaccgcaattgcgtcttcacgtgctggatcatcagtccgtttaacgcgaatctcaccaatttctaaaggggtaataattggctcatgattagccataataccaagttgcccggccatcgctggtacaaccaacaatgttgcgtggtgatcatagacaatcccacttggggtcacgatattaacggttaataccttttgttcttctgccatcattaacgcccctttctaagcttgtttcgtttcttgttcggatggtgtataacccaattctttagcttttgctaatgcagcatcaatattcccgacaagccggaatgcttcttcagggacatcatcatagtcacccgctaagatgcctttgaagcctgccactgtatcttttactggcacgtatgagccggcttggcctgtgaaggcttcggcaacgtggaagttttgtgataagaagaattgaatccgacgagcacgcgcaacgataatcttttcatcatcagataattcatccatccctaagatcgagatgatatcttgtaattcacgataccgttgtaagacgtgttgcacttctgaagcaacttcgtaatgttcttcgccaacaatttctggatccaaagcactagaagttgattctagtgggttaacagcaggataaatcccctgttgtgttaatttacgatccaagttagttgtagcatccaaatgcgcgaaagttgttgcaggcgcaggatcagtataatcatcagcaggcacataaatggcttggattgatgtaactgaaccttttttagtagacgtgattcgttcttgcaattggcccatttctgttgccaatgttggttggtaaccaacggcagaaggcatccgtcctaataaggcagaaacttctgaaccagcttgagtgaatcggaaaatgttatcgatgaacaataacacatcttggccttcaacatcacgaaagtattcagcaattgttaaaccagtcaaggcaactcgcatacgagcgccaggtgattcattcatttgaccgaaaaccatcgctgtcttttccaaaacgcctgattctttcatttcaaagtataagtcattaccttcacgtgttcgttcaccaacaccagtaaagacagaaataccaccatgttcttcagcgatattatggattaattcttggattaaaacggttttaccaacaccggcaccaccaaacaaaccaattttcccacctcgtaaataaggggcaagtaaatcgataaccttaatccctgtttcaagaatttctgaacttgtatttaattcctcaaatttaggtgcagaacggtggatactgtcccgtctaaaatctgcaggaaattcttcgccgccatcgattgtttcaccaagaacgttaaatacccgtcctaaagtttctttaccaactggtacgttaattgcacgaccagtgtcttcaacagccatcccccgacgtaaaccgtcagttgattccattgaaatagtacgcattaccccatcacctaattcaagtgccacttctaagacgacagattcgtcgttccctttgttgacaaccaaggcattattgatatctggtaaagtcgtatctaaagaaaattcgacatcgacaacgggaccaataacttggacaacttttcccatactcatagttgttattttcctcccgcgtttcttattctaatgctgccgcaccaccgacaatttcggtgatttctgtagtaatctgtgcttgacgtgcccggttaaatttaattgataaatcagaaattaaattattagcattatcagtggcactcttcatcgccgtcatggaagcagaatgttcagctgttttagaatcaagtagtgcgccgtaaatcaaactttcagcgtattgcggtagaatggcatctaaggcatcatcaacagaaggttctgtgatgtattcttgatctttatcagtgacttctgaaacatccaagtcggtaataggtagcattttttcagctcgaaaagcagatgtcagtgagttgacatggtggttgtaacaaacgtacaactcgtcaaacacgccgctatcatacattgcaacagctgttttgatgatttcacggacttcattaaatgatggcacatcacttacaccacgatattcgtaggataagttcatttgccgtgctttaaagaaatcagcaccagtaccaccaacggctaaaatagcatattcatcggcagacttgtggttttctgaaatcatttcaaccattgcttttaagattgagctgttataagcgccaaccaatccacgatcactcgtgatgaccaaataaccggtctttttgattggtctttccactaacaaattacttaacgtaatgtcatgccgcaatgatttctgtgaagtaccgttagtagcttctgctgctttagcggtacttttttgacgtgcacttgcaattaattgacttgcagccaaatgcgtgacgatttctcgaatcttattcgtatattgttgataagcgattgaatttttttcaatctgagaaagttttgcaccagagaccatttgcatagcactcgtaatttgcccagtttttttagtagaggcgattcttcgtttgatatccattaaagattcagccaattaattcaccccttactgtcctgagtcttgattgtcagcagtagcttcagcgccgacaaaaccttctgtgaaggatttgatagcagcatctaacttatctgtatctggcaatgcagcggtttgacggatagtgtccatcaagtcctttgcgttactttcaagataatcgctcaattgactttcatattgcatgatatcgtcaactggaacgtcatcaataaagccgtgtgttaatgcataaagaatcgttgtttgttgttcgaatggtaatggtttgtgaagtggttgtttcaaaacttcaacagtccgtttaccacgatttaatttcgcttgtgttgccgcatccaagtctgaaccgaattgcgtaaaggcttcaagttcacggtatgatgaaagatcaagacgtaatgtcccagaaaccttcttcatcgccttcgtttgcgctgcgcccccaacacgagaaacagatgacccagcatcaatcgctggacgtgttcctgaatagaataaatcactttccaagaagatctgaccatcagtgatggaaataacgttagttgggatataagctgagatgtccccagcttgtgtttcgatgattggtaaagcagtcattgaaccgccacctaattcatcacttaacttagcagcccgttccaataaacgtgaatgtaagtagaagatatcaccagggtaagcttcacggcctggaggtcttctcaaaagtaatgaaatttcacgataagcagcagcttgtttacttaaatcatcatagacgattaagacgtgcttgccgttatacatgaattcttcacccatcgctgcaccagcatatggtgcaatgtagagtaatggtgctggttgactaggaccagcttcgacaacgatggtataatccatagcgccgtaacgacgtaaggtttccacttgcgctctaacggtcgattctttttgaccgatcgcaacgtaaatacaaatcatgtcttgatctttttgattaataatcgtatcaatcgcaacagatgttttaccagtcttacgatccccgataattaattcacgttgaccacgaccgattggtaccaaagcatcaatggctttcaaacctgtttgtaaaggttctgaaacagattgacgtgccataacgccaggggccttcttttcgattggacgagttttgtccgttttaatttcgcctttgccgtccacgggttgacccaatggattaacaacacgaccaattaaagcatcgccaacaggcacttccataatccggcctgttcgtttaacttggtcaccttcacgaatgttttcatattcacctaagatgataatcccaacatcgttggtttccaagttttgcgcaaccccgtatgaaccgttagaaaattctagcaattcacttgaaagggcgttttctaaaccgtgagcacgtgcaatcccatcaccaacataagtgacagtaccgacttcttcaacggctaaatcttcattataatttgcaagttgttgtttaattaatgcactgatttcctcagttttgatgctcatcaggttcacctctttatcaacgattgactatttcaatagtaatgacttaatttgatctaagccatgtttaacactgccatcgatcaccttgtgattcgattccagtacaatcccaccaataatatctggatcaacgatactttccactaagacctgattgagaccttcgcgtttagcgtagctttggctaatctttgcgatttgatcaccatctaaagcaacggctgacgttaccttagcgtgtgcaatccccatcttttgatcataaagatcttcgtaggccgcaataatgtatggcatctcagccattctttgatagtcaaaaacaaggcttaaaaagtgttgcatgagtgtactaaattcaccggaaaggctctttagaagctcacgttgtttcaatccagataaagtcgtatcagtcagaactgcacccaatcttgggttgtcattgaaaatagtctcgagtgcttgtatctcttcatggatactttcaaattgttgctcttgttctgcaagggaaaataatgcctttgcatagcgttgtccgactgcatatttatctagtttcattttgcttgtccaacccttcaatataggaattgatcaatgacttttgatcagtaactgacaattctttcttaatgagtttagaagcaatttcaatagatagttgagcaacatcatctctcgcactgtttaacgcatctaaacgagattgttcgatgtcttttttagcattttgttttaaagtttggacttcttcttgagcaagtgtgaccatgccttcgcgttgtttttcaccatttcgcttggctgtattcacaatttcaactgcttctgacttagaattcttcaactctgttgcgcgttgtgctgctaatttggcagcatcttcacgtgattgagcggcgttatctaagtcgtttgtaattttgtcagaacgagcttgcatcatttttgaaacaggtccgaacgcaaatttaccaactaaagcgactaaaataataaagacaactaatacgaaaagtgaatctccaaggtaggcttcagaagcaccaacgattaaattactaaacatctattgacactccttccttgacttactgactaatttttaaagcgaaaatttagattcactcggattaactaaataagatcaagaaagaaacgacgatagaaagaattggaacagcttcaatcaacccaacaccgataaacattgttgagcgtaattctgctgataattctggttggcgtgccatactttcgattgtttttgagataaccttaccgttaccatatgatgctgcgaatgctgctaaaccagctgcgatagctgctgctaaatagttcatgttttttcctcctaatttttagtcttccatttcaactttttctgaaatatagactatcgataatgttacaaatacatatgcttggattgccccgataaagacggagaatccttgccaaaccatttggatcggtgccgtcacaagcatcgttgctggtccatgtgagaaggccattttaactaataaacttagtaaaacttcacccgcaaaaatgttcccgtacaaacgcaaggacaacgttaagaaattggtaaattgttcgatgatattaattggtaagaaaaatcctaccggtttaatataactcttcatgtaattaccaaaccctaaccgttcaacactaaagtagtgcgcaatcactaagacgatcatcgcaagcgacatagtgataatcggattggccgttggactcttcaaccaagttacatcatgtaccttaatttgaagaatcaaaccaagttgattactgataaatacgaacatgaacatgacgaatgcaaataagtaaaattgtttaccttcttcaccgggcatcgcacttttaacgattccgttcgtaaaatcaatgatccactccaaaatattctgccgtttagtcggtttaagcgcaatttttcttgataaaaagaaaacgagtgcaaaaaccaaaactgcacttactaagaccgatagacagtttgctaaattaaaacgaattcccaaaatgctaataatgggatatttatcatccacaaaattccctcctcccttaggcttatttgttgattccactctatcaacgactacgtctacgcgagttgcacaacgaacctaaaaacagcaatatttatgtagaaaaattaagcataaatcatcaccgcaatacaagtatgataataccaccattaaattaaaagtacaaagcaaatactaactaatttctaattatttttttgtcaatgcactcaaataccataaatattatcatatcaaaagattaaacttattaacggttgcttttttggcaaaaaaaacgcgtaacacaggaaaatcaagtgttgcgcgcttttattatcggtacctaattaatggctatttagtcccgaaaagacggtcgcctgcatcccctaaaccaggaacaatgtatccatcctcgtttaaatgatcatcaagaccagctgcatagatgtcaacatctggatgggcttcttgaacagctttaacaccttcaggtgcagccactagtacaacaaggcgcattgacgttgcgccgcgttttttaagggcatcgatggccatgattgctgagccaccagttgcaagcattggatcaacgatgaatagttgtcgttgatcgatatctgttggtaatttaacaaagtattcgtggggttgtaatgttttttcgtcacggtacataccaatgtgaccaactttagcggctgggattaattctaaaacgccatcaaccatcccaagacctgcacgcagaattggcacaacggctaattttttaccgctcaattgtttttcaattgcaggccccattggtgtttcaacttctacgtcttccattgctaaatcgcgcgtgatttcataaaccattaattctgcgatttcgtttgcgacttcgcggaaaactttagtacccgtatccttattccggataatcgttaatttgtgttgaattaacggatgatttaatactgtgaattttgccatttactttgcccctattctattcaatgaatttagtccaaatttttttcgcaaaaaaagagtgactccaaagaaaaccttctccgagtcactctcccttccgcgtaaaattctgtttactattgtagcgtaaatagcatcaaaaaactagcggtattcattaattaatctaaaaatttagcttgtgtgattggaaaacgatccgtcaacgctaaaacatctgcactaatgcgcgtcatggcgtctaattgatcgtgtttttcaatcacttctaaaattaattgcgcaatcaattcacaatccgcttctttaaacccgcgcgatgtgattgctggggtcccaattcgaatcccacttgccttaaatggacttaatttttcaaaaggaatggtattcttattaacggtaatgtggacactatctaaaaatgcttggacttccttcccatttaagccactctgcgttaaatcgagtaacattaaatgattgtcagtcccgcctgaaaccacacgtactaagtcagattgttcgaaaacggcagccatcgcttgcgcattggccacaatttgttttgtatatgctgtaaattcaggttgtaaatcttcaccaaatgcaacagctttcgccgcaatgacatgttcgagcggtccaccttgaataccagggaagatggcagagtcaattgctttggcatattctgctttacacaaaatcattccaccacgaggtccacgcaacgttttatgcgttgttgtggtcaccacatcggcatatggcactggacttggatgaacaccagttgccactaaaccagcaatgtgtgccatatcgaccattaaataggcaccgacatgatcggcaatggcgcgtaaccttgggaagtcaattgtccgactgtatgctgatgcccctgcaacaatcattttaggatgaatttcatccgctttagcagcgagcgcatcataatcgattcgttcgttatcgtcagcaacgccataactatagaagtgataaagttgcccactgaagttaaacggtgacccatgggttaaatgaccgccatctgtgaggttcatccctaaaatcttatcaccgggttctaaaagcgcttggtaaactgccatattagcctgcgaaccggagtgcggttgtacattggcatgttctgcattaaaaagttgtttagcacgttcaatcgcgagtgattcaatttgatcgataaattcacaaccaccgtaaaaccgtttgcccggataaccctcggcatatttattggttaatacgctaccttgtgcttcttgaacagctccggaaacaatgttttcagaagcaattagttcaatattatgcacctggcgttgttcctcttttttaatcaattcgtaaatttctggatcagtttgttcaatcatttacaatcactcctcttcctattaaaatagtgcctatttcgaagtaaagtattgttggccggcagacttctcgaggcgattcatatacgctaatccgacaccctcttttgcgaagccttgcactaatataattttaacctcaggattcaaatcaaaataccgtaatccttcaaacaagtgttgactagcagtcactacagaatcacctaaagagaactgatctttaaacctaacgtcagataactgccctaacaccgtatcaaccgccataacaccaaatggcacactttgttgactggcccatttaaccgccgccggaaattcatctggcgttggcactatgtaaacctgtgcatttggagcatagtgtttgtatttcatgcctggtgcctttggcgtttcagctgcgccaactttatggtggtttgtcataatcggcccaatcacacgttcaatggcttcttgagtcacaacaccgggtcgtaaaataacgggtgtcgcaacacttaaatcaatcaccgttgattccaacccaacaccagttggaccatcatcaatgacaccggcaatctttccatttagatcatgtaaaacgtgatcggcagtggttggactgggcttgcctgatgtattggctgaaggccccacaagtgggacaccggccgctttaatcaagtctaacgtcaccgcattgttcggcattctaaaggcagcggtctttaaaccacccgtcacaactgaatctagtgccgcatgttttagcggcaaaataattgtcaatgaaccgggccaaaaagcgtcgactaattgcttaaatcgatcactaacttcggctgcgtaatgctcaaccgtcgcaacacttgctacatgcacgattagcggattatcacttgggcgccccttagcggcataaactttcttaaccgcttcaggattcgtcgcatctgccccaagaccatagacggtctcagttggaaatgaaatcaattcgcccgcttttaaatctgctgctgcttgttcaatctgttctactgtgtatctcttggtttccattataggccttccttactctacttctgatttacatcataccaaattccgattgaaatcgtaacccacacgggccattctagaccaattagccatatctttcttgactgtaaccgctacatcggtcgattcatgttcgaataaccgaacgatcgcctctttttgctgataaccgaactctaaataaagctgcccatctggttttaaatacgcacgcacttctttagcaaaccgttcataaaacgctaagccgttattatctgcaaatagggccaagtcgggttcgtatttcaaaacggacgcatccatcacatgccgttcatcttgtgcaatatatggcggattagacacaatcacatcaaactgttggcccatcactggggttagaaaatcacccacgataaagttaacatgcgcgtttaattggcgcgcatttgcttgtgcaacagcaatcgcttctagtgaaatatcaattgcggtcacttcccattctggatgctcacaggcaagggtaattgcaatggcgcccgttcctgtcccaacatccaacactttaagtggtcggttctttggttgtgtagcatctaatatccattctaccaattcttccgtctcaagtcgtggaataagcgttgccggcgtcaccttaaaatcgcgtccgtaaaaattagcatatcccaaaatgtattgtgccggttgatcagcgataaacgcgtttaagtctgcttgatactgatcgtattcggcagtcggcatttcatcgtgataatgcaagaccagttgggtcgtcgtccaatgtttacgaccgagtagtaaaaagcgcgctgcttcacgttctttagcgtattcttctaaaaataaaaaagcccaattcagggctttaagataagtgagctgtgccatcttgtaattgctccaatttttcggtttgatcgtaaagaattaacgcatcaatgacgtcgcctaattccccgttcataatccgatctaatttgtttaacgttaaaccaattcgatgatccgtcactcggttttgtggatagttatatgttctaatccgttcagaacgatccccagacccaaccgctgacttccggcttgaatcgtattcactttgattttgtgattcatagaaatcataaacccgtgactgtaagatttgcattgccttcactcggttttgttgttgtgaccgttgatcttgcatcgcaaccacaatcccggttggaatatgcgtcatccgcacggctgaagaggttttattgatatgttgaccaccagcacctgaggcacgataaacgtcagtccgaatatccttaggatcgagctgcacgtcaaccccatcatattcaggcataactgcaacagtcgctgttgaggtatgaacacgaccttgtgattcggtctttgggatccgttggacacggtgcgcaccattttcatattttaacttcgaataaacatttttaccggtaatcatcatcgcaacttctttgaagccacccacttctgtagccgtttcatcgatgatttcagtttgccagttttgtgattcagcgtagcgttgatacatattcaacaaatcacctgcaaagagactggcttcgtcgccaccagcagccccacgaatttccatgatgatattcttttcatcgttaggatccgttggtaacatcaaaatcttgatgtcttgttctaattgttccttttcatcttgtaactcacttaaatccgctttagctaattcttccatttctgggtcattagattcgcgtaacaattcttcgctttctgcaatgtcgtttaagacagtcttcaaacgcgtgtatttaccaacaatttcccgtaaacccgcttcttctttagacaattccatataccgactggtttcgttgatcacttctggatcagacattaattcctgtaattccgcatagcggtctaacaaactatcaagttgttcaaacattttatccatgaatgactagccttccttttcactctcttgtgttaccggtgggttaaaatagtgtttccgacaaacggggtagtatgcttcgttgcccccgatttgaatctgttcacccgtataaaccggtttgccatcgttcattcgcaagttcataatcgcttttttgcgacagaaccaacagatggtcttcatttcttcaatcttattggcaaatagcaataagtatttcgagccttcgaataattcattcttaaaatcattcttcaacccaaacgccatcactgggatattcaaatcatcaacgacctgcgccgcttcgattacgtgatgccgttctaaaaattgtgattcatcaatcaagacacacgctgcatccggattagtcgattgtaccaactcaaagatattcgtatccgagaaaatcggtgtcgcctcacgtttgagcccaatccgacttgaaacaatccccaccccgtcgcgattatcaatcccactcgtcaggatgatcactgatttattctgctcttcataattgtgtgcgacttttaaaatttcaatcgacttaccactattcattgcaccatatctaaaaaataattgcgccactctcaaacacccctatgttaagcacattttaatctagtatacctgaaaatcagcgaggcaacaatattcgccactattaaattctaaagtttcccttattttatttgcagatgcgtttttatatcgtccaaattgagaatttatgctatgattatgaacattgaaagggtggcaagcatgacaattaaaagctcatttgcaattacagcaggacgtttttcatattggtatttacatacctttatgaaaggtggcagctccctccccgggaaaatcgcaaccaagttcgatcctgctgtgttaaagcagttaaccaagaactacgacgtgattatcattaccggtaccaatggtaaaacattaacgaccgcactcactgtgcagacgttgaagcaaaaatacgatcatatcatgaccaattcgagtggctcgaacatgatgcaagggttgaccaccgcctttttagcagatcatcctcaaaaaggacaacggcaattggccgtcctcgaagtcgatgaagccaatgtggaacccctttgtcactacatcaagcccaaagcgattgtgatgacgaatattttccgtgatcagatggatcgtttcggcgaaatctacacgacttataatatgattctagcgggcgtcaaactcgttcctgaggcaaccctcattatgaacgctgacttgcctctcttttcatcggttgaacttcctaatccaaagatttattacggattcaaccacttaccagatggcgaaatgatggctccaagcaacacagacggcgttttgtgccccgtttgtgatcacatcattcattacaaattcatcagttatgccagccaagggaagttttactgccctaattgtggctaccaacgacctgaattagacgaagcagtcactgccatcaatcagatgcaccccacaaattcacactttgaaattaacaacgaaccgtttgaaatttcaattggcggcatgtacaacatctataacgcacttgcagcctatagtgtcggtcgattctttgatattccagtgaaagcaattcaaaaggccttcactgaagacaaacgaatctttggccgtcaagaagtcattcaattaaaagacaaagcggtcacattggtactcgttaaaaatccggttggcttaaaccaagtcttacaaatgatcagttctgatccagaagacttttcactcgcaatgttgcttaatgctaactatgccgatggaattgatacgagttggatttgggatggcgagtttgaagacttactcaaacacaacattccaaccgtgattaccggtggcgaacgcggtgacgatatcgctttccggctaaaagtagctggtgtcacggcagatcaattacacgaaactaaagaactcgatgcaacgatggcagctattgaagcagccccaaccaaacatgtttatgtattagcaacttataccgctgttttacaactacgtaagaagctggcagctgccaattatattaagaaaggactatcagtatgacccagacattaagaatttgtcatctatacggcaatttaatgaacacatatggtgatcttggtaatattttagtccttgattactatgccaaaaaagttggcattcaaactgaaacagaagtcattagtatcggtcaagatttcgatgcaagtcgttacgatatcgttctcttcggcggtggccaagacttcgaacaaaaaatcatctcagaagacctcaacgacaaaaaagcagccctcaccgaatacattgaaaacggtggtgttatgcttgccatctgtggtggttatcaattattaggtcactactatattggcgcaaacggcgacaagattcctggaatcggcgcacttgatcattacacattgagccaagataacaatcgttttatcggtgatattgtcatcgaaaaccgtgagtttaacgaaacctacctcggttttgaaaatcacaacggccggactttcttgggcaaggatgaaaaaccacttggttacatcaaacgtggtcacggcaacaatggtgatgacggcaccgaaggttgtgtttataaaaacacatttggttcatacttccatggtccaattctcacgcacaacggtgttttagccaaacgacttttatcgattgcggttagccggcgtttcccagaatttgatttacaacaaatcgctgacttaccactcgaagaatcacgttaccaagtcgatgcagccggcgtcaaacgcgtccaaaattaacaaatcaaaaagtcgaccattatgcggtcgacttttttgatgtcttaatcatttcgcaagaaaaaatacactttttattcataaaatgataatcgtttcacaatacttgctcgatatactgactttaacctataaaaaggagcgaatcattatgttaaatcaaatgccagcagtcgagtccgttcaaattaatcggattgaaaatcatgataaagttttcgcaaccactgaaagtggtcaagaaatcgaattacatattaccgaccaacaaaaaaaggaccgcctcttctgggaatccctcatcaatatcctccgcgctgaattgtggttacccctgcaaaagagaacccacgaactactccaaaacgactggctaacggtcgatggctaacgtgtggctctgggttcggatgacttacagaacacgtttaaacgatcagaacacaactatccaaaagggcgctaacaaaaatattgttaccgcccttttgcatatcaatgtttcgttttttagcgttgccctgtccactccgctaaatactgatccacaaactggtgcatgaaatccgttcgcgcttgcgcgatttcgcgcgctgcctgtgtgttcatcgttgctgccaatttaaataatttctcataaaaatggttaatcacggtagacggttcgcgatagttttcctttgtcaattccgcccgtggttgaatctcaggatcataagcaaccccatcgtgtgcgccaccatacatgaaggtccgcccaatcccaatcgcgccgattgcatctaaccgatccgcatcttgaacgatttgcccttctaaacttagcgtttggtgttgattgagatttttcgaaaaggacatgtggtcgataatatcaaaaattgccgtttgttggccatcttgtatgccgttttcggttagtttagtttttaccttttgtcgagcctgttcaacatcagtcgcgattttttcatcaatcacatcatgcaataaggccgccaagataatcgttgttaggtccgcagctaactctttttgctgaattaaacgggcattattcacgacccgttgaatgtgatcgaatccatgaccgctgtgttctgctgccaattccgttcgtacaaattgttcaattgcttcgatttgtctttgcatacttgtcatcctactcttttaatcattaaaaaaaattgcaaccacggctgcggttgcaattggttatattcagtttacttattacccggttctgacgcaataatttgcatgtcaccttttaagtcccatgacttaatatcaaatggtaacacaaaatgcatattcttgtgaattgggtaagtttgcccatcggcaatcagttcgccttcaccatcgaccacggagactaaagtatagggtgccgttgtccgatcaaagtgtaagtcgcccttcactaaccattggtaaacactgaaaaatggtgacattggtggttgcacataagtcgtgattgttgaatctccaacatgttctgtttgaatattcaaaacgggatcttgatgcggcacaatcgtcgtatcaattgattgcttcaagtgtagttcgcgtttttcgcccgtcttagcatcaacccgatcataatcgtataaccgatatgttgtatcactactttgttgggtttcaagcgccataatccctttgttcaatgcgtgaatcgtgccacttgggacgtagaaaaagtcaccagtcttaacgggcactttgcggagtaaatcatcccacttgcctgcttcaatcattgctgttaattccgctttggtcttggcatggtggccatagattaaataagcacctggttcagcatccaaaatataccaacattccgtcttaccgagttcggttggaccttcatgagcagcagcataagcgtcatctgggtgcacttggacagaaagacttgcttcagcatccaaaatcttagttaacaatgggaatactttaccttctgcattaccgaaatattcgcggtgggttgcccatgcttgatctaatgtgagcccttttaatgggccattttcgatggtactaggaccatggggatgggctgaaatggcccaacattcaccaatatcgccgtctggtaaatcataatcgaaggcttcagctaatttgcgaccaccccaaattttttcttgaaaaacaggttttagaaataaaggttctgtcaattcactcactcctaatgcgctttatttatcaatagtcccattttaccacaaatgtaagcggataatacgcaaatttgcgaatttgactaggcttttgtttctaggtgattatccgctaaaaattgtgccacaatcgcatctcgtcgttccaaaaagaccggattatcagccgttggatgaatgcgattactcaggacaatcagccccgtttgccgcttgcgatccaatagcatgaacgtgccggtaaaaccggtgtgataaatcagtggctggtgttcttgcggctcaaagcgcaaatcccagcccagtgagcgcccgagatgttttggtgtccaatcacgatagagactcttaacactcgcctgactgattggtggctgttcaaccttcaactgccctaattggaactgggcaaagcggacaacgtcttttaatggggcaaacaagccggctgcaccactatgattttgtaaaatcgcacttttcggatcgtggaccgtgccttggattaagccgcgttcggcactcaattcagtcgggaccgccaaacttttgtccggattaaacgtactggcttgcataccgagtggggttaaaacgagttcttgaatcaaatcctgaatcggtttttgatagatggcttcaatcatccagcccaaatacaacataccaatgtccgtgtaaacaaccttttcaccaaaatttgggccgaccgttaattgcgtcaaaagcgccgtttttaattcggcagccgataattgattccgattcggaatgtagcctgttaaaccggacgtgtgcgtcaatagatgcaagaccgtcacccgtcgatctttaaaggccggcaacaaactatgcacttttgttcgtaaagaaagccgccctttttccaatagccgtaaaataatggtcgtcgtcccaatcactttcgttaatgacgctaaatcatacaactgatcagcttttaacggcactttttggggcactaattcggcctgcccgattacattagtcatcacttcagggccttcgatgatggcataagaaacaccagggacaatcccttcatcaactagcgcttcaatttgccggatggtttgttcaaatcgcatgttaaattcctcctactacatcaatatcactagtatacgccaaacacggacaaaaataaggccgcagattttatctgcggccttatttgcgtcattcatgattaaattttaacgttgcctgagaattgactattgtacaagtcagcgtagaaaccatcttgtgccatcaaactatcatgggtcccggtttcaataatcgaaccgtgattcatcacgatgatgttatcggcatcgcgaatcgtcgataaacgatgggcaaccacgaaactggtccgattttgcaacaagcgttccatggcgtgttgaatatgaatttcagtccgtgtatccactgaactggttgcttcatccaagatcaaaatctctggatcggcaacaaaggcccgcgcaatcgtcaataattggcgttgaccttgggagatattcgaagcttcttcattcaagaccgtctcatagccatcaggtaattgacggacaaaaccgtcaacgtgcgctgctttggcggctgctaaaatggcttcatctgaagcatcagcgttcccatatttcaaattatcccaaatcgttccagtaaataaccaagtatcttgtaaaaccatcgcgaagtgacgccgtaattgttcccgagtcatatcgcgcgtatcgacacctttaagcttgattgaaccgccactcacgtcgtagaagcgttccaacaagttaatgatggttgttttaccagcacctgttgggccgacaatcgcaatcatttgacctggtttgacttgcaagttgtaatccttcatcaagatatctttaccttgataaccgaattcgacatgttctaattcaagtagattttggtcatcaacaatcgctggcacttctgatgggtcgtcactcatgtcatcttcatctaagacttcaaagacccgttcagctgaggcaaccgttgattggattgtattcgctaagttggccaattgcgtgattggttgtgagaattgttgcgtatattgcatgaacgcttgcatatcccctaaagtaacttggccgtgagaaacacgaatccccccaacaattgctacgaagacgtaaccaatgttattgacgaacgtcattaacggcatgatgaccccagaaataaattgtgccttccaagctgctttatagagtaatgcattttgttcttcaaaggcatcaattgtgacttgttcgcggttgaaggtctttaagaccacttgaccagagaaattttcttcaatttggttgttcaacaaccccaaacttttttgttgcgctgcgaagaatttctgtgatttcggtgcgacaatcccgacgacgactaaactgagtggaatcgtgactaaggcaattaaagtcaattgccaactaatcgagagcatcatccacataacgccaataaatgtcacagcactggttaccatttgcgttaaactttgttgcaaggtacttgcaatgttgtccatatcattaatcgcacgactcatgatatcgccgtttgagtgtgtgtcgtagtaattaatcggtacccgttgcatcttgtcttttaattctttccgtaattcatagacggtttgttgggaaatccgcgtcatgatgaattgttgtaagaaactgaaaaccgctgatgctaagtacatcaaaatcaccgtcataataatgtgttgaatcttatcgaaatcaattggtaagccattcatcggcatgcccgctttttgcatggcattgcccttcataacacccttgaagatttcggtcgttgcttgtcctaatacttttggtgttctaatttggaaaataacggagatgattgctaaggctaacacaatcactaatccgattaaccggctagacatgtaggttaataatcgtttggttgtgccccaaaaattcttcggtttttcaacgacaccacccatgccacggcctgggccatgtccaccttggggtcgattggttgttgttttttcagccattagtcttcatccccctctctgatttgtgagttaataatttcttgatatgtggcgttattagccttcaattcagcatgtgagcctttaccgaccagctggccttcatccaagaccaagatggtgtcggcatcggcaacggttgatacccgttgaccaacaatcacaacgacactcttttgaatttcagcatcttcttttaaggctttccgtaataaggcatccgtcttaaagtccaacgctgagaaagaatcatcaaagacataaacagccgcttttttaaccaacgcccgtgcgatggcaagccgttgacgttgaccaccagagaagttgcccccaccttgttcaacgtgactatctaagccaccttcaagttcgctgacgaaatctttagattgtgcaatttcaagtgcgtgccagatttcatcatcggtcgcattcggattcccatattgcatattttcccgaatcgtcccggtaaataagttcgctttttgagggacaaatgcaacttgttggtgaatgtcatggagggtcacatctttcacgtttaaccctttgactgtcacttcacccgtttcaacatcgtaaaaacgaggaatcaagttgactaacgtggtcttccctgagccagtgcctccaatcacggcgactgtttggcccgctgtcatttggaaatcaacgttttcaagcgctaagtgttccgcattttgataacggaagttgacctggttgaaagccaagcttgctggttgatcaccaaacgttttaggcgtcgctggatcttcaatcggcgtgtgtaaatcaagcacttcattaatccgcactgctgaagcttgcgcccgcgggataaagacgaagaccattgaaagcatcatgaaactcatgaggatttgcatcgcataagtcacgaacgctaataaattcccgacttgcattgcttgattggcgattaagtgtccacccatccaagtaatcgcaatgttagtcccactcatgattaacgtcatggctgggaacatcactgacataatactataaactttcttcgcattttgcgtgtagtcagtattagcttcatcaaaacgttcttgttcgaacttgtcgcgccggaatgctcgaatgacccgaaccccggttaaaccttcccggaaaactaagttaatccggtctgtctttttctgcattgccttgaataatggcacagcgaagtacatcaccccaccaatgaagagtgccatgattggtaagacaaccaagaaaatggatgtaagttgcgcatctttttgatacgctaagaaacttgcgccaatcaacatgataggtgccataatcatcatccgtaagaacatcattgccacattttgaatctgcaccacatcgttagtcgtccgcgtaattagtgaagacgtcccaacttgatccatttcatcgtgtgagaagttgatgaccttccggtagatatctgaacgtaatttttggcctaagccttgtgacgtccgtgccgcaagataaacgttgcagacggccgcgataatactaattaatgaaaaacctaacattttaaagcctgcttgccagatataatcaatattccccttagcaatcccgtcattgacaatgtcggaggttaaattgggtaaataaaggttactgacaacctgaatcgtcatgaataaaaccgcaccaaagacggcccaacctgacattcttttctttgcaagtttaagcatgttgtgtgtcccttctttccttatccttgtttgctggcccctgtttctaaccagcctaatactaattcgaagcgttcttggacctgttcaattgtaatcgcatggtcactttcttgttgcagataatacgctgcaatactttgaaagaccgtcgtcatcaactcatgaaataaaattctaagcgcttcgggttgatctgcgttaatcttgagcaagtcgtaattgacgttttcttctaaaaagcgcatcccatctacttgtttggcatgcattaattctggtgacatcttgcgctggttcttataatccatatgtaagaagaggtgcttgtaaaattgtgcattttcaccattaataatctcttctgccatttcagcaaagaattggcgaattgccttgaatagatcaccatgaacagccaacagactcttttctaaatcctgctttgaactgtcgcgtaataagctaatgtcgtagaaaaaaatatccgccttatcttcaaagtactgataaaaactgcctcgcggaatctccgccgttttaataatgttgctgacagatgcttcattaaacggtacccgtgaaaactcagcatgcgcagcttgaatcagtcgttgttgcttttcctcaggtaatctaaaaaatgttttcttcggcatttcgatactcctttctgaaaattaatgacagagcgtcataattgtgacgtaatgtcataatacgccaacttaggcactcatgcaagcattaaatccacaaaaaaagaaccggcaggctatcgtctgccggttccctttaaaaggcgctatttatcgtctttgtccattttttctttaatatcatccatcacgtcattggctttttcagcaactttgtctttggcatccgctaatttttctttagcttcacccataaagccctttgctttacctttggcctcagtttcgcgatcaccagtcaccttaccggctgtttcttgtactttaccggttacttggtctttcatgccatctaacttttctttatctgtcattcaaaatcactccttcttattggtctacctatatgataggatagctaaccaatattagtcaaaatttatgattatgagtcgcattatgtcagtttaccatcgcgcatcacgtattgatgatctgtataatccaagacgcgttcatcatgggaaaccatcacaatcgtctgtcctgtctctttcgtgattttagccagctgctcagcaacctgtaaggcccgtttactatctaaactagcggttggttcatccgcaaaaatcaaatctggctgaccatacaatgcccgagcaatcgcaactcgttgacgctgaccaccagataagctcgttgggtactgacgtcgttgattccaaacacctaaattggttaatagttgttcagctgattgtggcgcttgcttttcacgtaatcgatcgactagttcgaattgttcttcaaccgttaaaaatggaaccagattcgaactttgtaatataaagccgaaatcgttaaaccgtaatgcagaccgctgtttttcgcttaattgactaatctcttgatctttaaaaaagagcttcccactcgttgggccttgtaaactacccataatcgttaataaggtcgtcttcccagaaccagatggtccggttaaaccaatgaactggcccttttcaatcgttaaatcgatttgatctaaagccgtggtttgctggtcgcctgcgccaaattttttgacgattttttctaaacgcattaaagccatcctatgcccctccaatcgcatcaagcggatcaatcttcagaatccgccaaattgagaataaagcgccaatgactgtcatcacaagtaaaacagcagaaaaggccccaattagtaaaggattatttgtatacggcaccgccgctggtaataccaatgttgtcaatgcgttacacaacaaaccaaggccaatcccaatcacccctaagaatacagattgccacattaaactaccaactaattggccacctgaaatcccttgtgctcgcatcaccccgtatacggccgttttttcaatagtaataatatacatgaaaatcccaacgataaaggcgacgatgactagcaatgcgccaatcatcaaaccaaacgtcttaacctgtggcccataccccggaatcttatcgattaattctggaattgtcagtttggtcagctgatccgttgtcttaatccgcgcgtttccctttaatactaaagcattaatgcgcgtaatctgatcagtgccgtagcgcattcggctaaaatcggtcaaccgcaaataagtcaccggttgcgtattatagcggtggttcgtcgtaatcccaacaattttgtacttttgttgacgcccattcaatttaatttgttgatttaaagcaattccttgtaagccgtcgtcgaccacaatctcatttgcctttttaggataccgtcctttttgcaacttaggcttcaaaaaagcatcaaaatcgataccaaaaacactcgtattttgcttacttaaacctgaaccactcacaacacccatcatctgagcaagttgcgcatgatttttctgtgcacctttaatagagggtaattgatcaacatctaattcagaagctgccaagtttttattcgcatactgactaataacaacttctttggcgtgccattgatcaattgccgaacggttattattggctagcccatatgccaaccccgttaaaaaatagattaaatatgcaattagaaaaatcgtaaaaatgatcaacgaataacgtaatttagcatgtttaatttctttaattgctaaatacatccaaacacccctttcttaactgttttaatctaacataaagcatcgtgccttgaacagcaatccgcattcaatcttttattcattcacgggaatatgctatgataagcacacggaggtggcgcttatcaaacacgtcaaacatgggattgcctttttgcttctgattatcatccaacaagttcctttaatgattgtcagtggcttaacattgctccctaaggcccaacagacaacccatctaattttagtctttggttggctttttctaatcacgactatcggcattactgccctaatgtggtattactaccaaaaaattaaatcaacgcgttatgaccaacccttcaccaaacagacttggtggacaatgttgattggctttatcgcgatggttgctgtcaataacggtacaatcccgtttatgcatactaccggtaatgccaatgttgatgcactaacctcagtctttcagacgattggtattttcatgctaccatacgccctattcttaggtccgattatggaggaattacttttcagagggttcctaatgaattggtttttcccaggcacaccaatcatctcaatcgggttaagtgctatcttattcggattgatgcacggcgcaactgatccgatttatttcatttcaaaagcactgcttggcctaattctggctatcgtctactatcgcacccataatattaagagtaatattgccttacacatgttgaataacattactgctggctttacgattttttaaacgactagaaaggaagcatgactatgtctgcattaacaaccatcttaacttacatccaagaacatcctgatgaagtggttctagaaccgtttcaatatgcgaacgtgattcgctttggcattagtgaccaagtcgatctgccagatgccgagaaactgttccctgatatgcggctacacgttaaccggattgaccccgagtacgtcaaagaacaccatgacttattgacgactttttatcaacaaaccgaagaaaaacaaaaagacggcttccaagatgtgtggattactaccgcccatcttagtgaccgtcaactttatttagtggatctttcttttgaataagcctcattttgaacagctaaaggtcagctgtattaagtatgctattttaaccttgtttctctttgtcatgcgtgcctttattgcgcatcccatcattatgattgccagttggattagcactgctgtttgcggcgcatatttcattgccatgttaattgtttattattacggctaacgttgcatatgtttggtctcagcaatcacttcttctgtaaaatacaattgaaaaccaaagaacaccgtcaacataatcgcagctatccatgcagtgcgcacattgattaacttaacaattaaccctgagctaatagtaccaatgaagaagctaccaacaattaacccgaagtaccgggctttttgttggtagtttttttctttggtcgctaaatatagataagtattttcgattaatttcttataattgccggtcgtaaaagcattcgcatatggatagccattaaccgttgaataactcgctaattgcatggccatcgacatcgacagaatcggtgtcacaaacatgttgggaatcgcggttgataaaaaaccaactactactaaagcaataatttgaaaacctaataaccacaaccgccaaacattcaacccaccagtgttaaaatgccgcttcgccagctgcacaataataaccccaaacccaaatgaaataatgggtaatatcttttcaggaagttgtgcccactggttcgttgcgatatctaagccgatgaacacgatattaccggtctgtgcactcgcaaagacgccaccacgtaaaatcacacaatacgcatctaagaagccaccaagaaacgttaaaaacatcgccgtgcttagccgatcatgaaaccctatttctttttgcaacccaatccctccaaatcaatactcttattatacgcaaattaaaattgaaatcaaaaaacggattgcactatttcacagtcgaaataaggtacaatccgctttacactataaattaattgaattgacatcttgaccatggaccacttttctaaagtcgaccagtcctaagtccaaaccgcgcagcaatacttcagccgtcccgacgttggttgccaacggtacttcataaacgtcagataatcgaattaatgcattcacatccggttcgtgaggttgagcagtcaatggatctctcaaaaagattaccaggtccatcttattttctgaaatcaacgcgccaatttgctgatcgccccctagaggacctgacttaaaccgtgtaatcggcaagccagttgcttcaataattttttgaccagtcgttccagtcgcaaataattcgtgttgcgccaaaataggtttataagccgtcgccagtttcacaatcgttggtttctgacgatcatgtgcaattaatgcaattttcatctgaatccctcctaatgtctgcggtgtttaaccaccgtaaaaaagtgtaacacacttgccaatagaatgaagaagattaaaacgaatgacacataattaagccaaaactggccaattggcaacactaagttcactaattgttgcagtaacatcgtaatcaaggttgcacaagcgaccatgccaaatagttgtatatatcgtttcactgtatcatccgtcctctgtgctttagattgaatgcttgcgccgacttggcgacattccgcttgtttctgcgctgaaagtgtctttaaaccatacgtttttgtctggacaacttcccggatttttaaaagtccagctgcccccaagactttatcaaaagttctaaaagtcccatcagtcacaccagtaaccaattcctcagctggactggcataacaactactaatcgtaatgtaacttttgcctttgaagcgatctggtaacgcatctcccgcccgattaaatcggactaaccgttgccgcacgcaatccaagaagtttttcatcacacccgacattgcaccccaataagttggcgcagccagtatccaaacatcggctgccaataacttagcttccagttcatctaataccggattggctttgccagcatctggtaatatttgataatcatttaaaaagatcacttcaacgtcatcttccggttttacacctgctaaaacggcatctaaaagttgcccattgaccccatctcgttgatgactgcctaacactcctaaaatcttcatctgatcaagcctcactctttatactactttcagtttacacttccaatcactaacttaccataaaaaaacgcccagaccaatggcctagacgttgtcattattttagtttagtaccaaccattacttaaccagaagctcttagcggcatcccatgaaccataacgacttgttacatattgatctgcaacgcggtcttggttagctgctgaataatcaccatttaagtatgaagctgataattgataacggccgattaattgaccgttacgtgctgaatatgaaccgcctgattctttttgtgcaatccattccttagatgaactcgttgtagttgttatttgtgcagctacaggtgcttgttgtactggtgcagcttgaactgcaggttgtgcttgaactacaggggctggtgtttgaacaggtgcagctacttgttgagttacaacaggggctggtgtttgtgccacttgatcagcatcaattgttaattgttcaccaacaaagatcatattaatatcagcgatattattagttgttgcgatttggttaacaagctcggtactaccattgaatttttgcgcaatggttgaaagcgtatcaccatttgcaacggtataagttgttgcggcactggcttgtgattggttaacgaaaagtaacccggttgttgcgacggttgttaaagcggcactgtaaagtaaagtttttaaagatttcatattttgaatggactccttattgtttaaattgatttttctatctgtttaacgtgggactaatataccatcttaaatccgttagtaaatatcaaaaccataacaattgatgacaaatccgtaacaaaatgacggcaatttcacctaactttgtaatgaagcccacaatttaattgacctgtaatcgacctaaaagctaataacaccaaggattacagtcaataaaaatgctaaatatgctattttgaattaattaaccttctttcaaaaataatcgccctatttaacgtaataataagacgaggtgatcaaaatgaaagttttaaaattaaatgatttagatttaaacgtcgcattggatgatcgaatgattcaaatttccggtgctcaggacacaacattaattttcaaaagtaagctattagcacactattggttcttcaatttacgggctttagctaagattgcggatcgctatgcgatccaaatcatgtttgagacagagaactacaaataatctgccctatcgatatgaagccacaaaaaaagagctgattactcagctctttctatcttaattgggtatatagggctcgaacctataaattccggattcagagtccggtgccttaccaatttggcgaatacccaatatcatcaacgaatactatgatactgcacactccagacgttgtcaattatgatttttaacaaatctttaaaagaggactatactattcttggaggtggttccaatgatgaaaaaagcagaaatcgaaaaattatttgacgggaaagttgccgtatatgatcaagaccacgttgtgattgattggatagattcacgcaggacgcttgaagtcacaattgataacgatattctaaatctactgataaaccatcaggactatattcggaatatcttgaaacatttaaagagacaaacaaatcgcactatgaccaaggaaattattaacattaatcgtcgtaactataaaatcttcatttagcctcgctagagtcaattaaccattgacattacaggctttattcgctaagatattagttgttccgaacattgcccgttggtcaaatcggttaagacgtcgccctctcaaggcggagttacgggttcgatccccgtacgggtgatatttaaaacagcctagaacccagaaaagccgttaaactaaggtttagcggcttttttgtttgtttaaaacgtgtaaaaaagctagcctcctgacgctttagttagggggctagtttttttattgcgtagatttcttctattaaaatggcttcatttgccacaattatttggctaccaaaccagccactgattaaaccttccaccttactgggtacaataccttctattgaacgttctgctttgtcgatttgaaccggataacatttaacaattgcgtcattgatggtattagcaatcatctcagcagtcatcgcctcaatgtgtttttcattgcgcttacgatcttgtacgcggttattcttatctaacactgccgtatgatcgcttaaatagaacccttgccatttcatcatgccacgatcataataatcatacttcaaaaattgattaaccaaattgggatcatattcatcattattcataggcgttctctccagcatgcccaccgactaagccagcacgctcaattgcagtcgcaccttttactttgctagacaatttgaccaccgatgtaaaaccgtagcgcttgcgaatttcatcgaccgtgctatctaatttctgctttttcaaattaataaactgtgtgtcgaacatatctaattgttccgcactatcgtcaaccaaattgctgcacgcaatactaatatgccgaatcgattcgtgttgccattcttcacgaaaaagttggatggcatgttttgtgagttgctgattagcattagtcgcatcaatcttcattgaacgcccaaaaccaccacgcgatgcatcctcttttgcagcaaatgaaaagccaatccccagactgataaccgtggtcgccttgtgatgcgccctgagacgtgcagccacttgctctgcaatttcccgaatcacaacttcaatctcagcttggataaaataatcgcgtggtaatacctgactattcccataagacttctctttggccttatatttatgccgtacaacggcccgatcaatcccccaactaaacgcaaacaactgcgcgcccatgacacccatttcttgttttaaccgatagggatttgtatgcgcaatatcgtacatcgaatgaatgtgtttctgattcagtttctctgccgtacgatgcccaattgaccagacatcatctaactgggtcactggccacagtttatctgggacatcttcataatgccattctgcaatcaaactgtgattccgtttggcctcaagatccaatgcgagcttggcaagtagcggattatcgccaatccccaccgttaaataaatgcccgtttctttttttacagccagctgaattttacgtgcgacttcgtacggcgtcgctccaaagagttgccaactatccgtgacatcaagtaacgattcatcaatggaatacggttgaatatcttcttctgccgtaaattgctgaaaaatacggttaatcttctggttcacttggatgtacaaattcatcttgggtggctcaatgattaaccgcttatcatgaattggaacatcccaggcacgcgttacgttactgataccaaataatttcttagccatgggactggctgccaatactaaaccactgcccgtgtttttctccgtggacatcaccaccaaaatagcctttaacggattcagtttcaaccgaacggcctctactgatgcgtaaaaagatttcgaatcaatcattaaaatcacgcggcgtagttcattctgatagtcatacacgactcttcaccccaacttgaatctgacgcacttgttcatctaattcgcgttgccaccgattaatctcaatcaaggtgacggctgatagatgacgataaataaattgcggaaacttatcgcggttgtagtaataattcattgagtcaatcaaatcatcactatgattcaccgctaatcgccgcaattctaaaactccaaagccatttaaatataaactcaatcctgtttgatctagcgtaatcacttctttattcgtatgcatcaggcacacctctttaattcatcttatgtcctcttaattatacgaacatacattcgatttagtcaagtgtgatttctcagagaacaaaaaacgctcaatcaaattaaatttgattgagcgttaaaggaaccttaaattttaataccaaccgttacttaaccagaaactcttagcggcatcccatgaaccgtaacgacttgttacgtattgatctgcgacgcggtcttgattggttgctgaatagtcaccatttaaatatgatgcggttaattgataacggccaatcatttgaccgttacgcgctgagtatgaaccaccagattctttttgcgcaatccattctttcgctgaactagttgtcggtgcaacagcagctgtttgttgaactggtgtagcttgcactgtaggttgtgcttgaacaactggtgctggtgtttgaacagcggctggttgtgcaacaactactggcgttgtcgtttgaacaggggttgctgtttggtcagtgtcgattgttaattgttccccgacaaaaatcatgttgatatcttgaatgttgtttgttgtggcaatttgattgactaaatctgtgttaccggcaaatttttgggcgattgttgataacgtatccccagttgcaacggtataagtagtagcggcacttgcttttgattgaccaacgaaaagtaatcctgctgttgcagccgttgtcaatgtagcgctaagcaataatgtcttaaaagatttcatgtaatagatgtgctccttgttgttttgatttattaacgtgggactaatataccatcttatattcgcttgtacatatcaaaaccataacaattgatgacaaacaggtaacaaaatgacggcaattcccgcgctaattgtaatgcacaccgcttacttgactgctattaaacaaataacgcctaggacaatcttctgtcctaggcgttataaactaatttattgatgttattcacgacgttttaaatgatacttagagaccgatttttggcggccaagaactagcggaatacgttccacgaacacatcactatagtccaatccaaaccatgaagccggtgtatcagtgaatttttctaaccataaacgcatttgaacaatccctttatccattgctcgaatttgagttgctggtgataaatcttcttgcatgatcacaaacgagaaatcgccaacgttccgatttggaattgttgtgtagcgttgtggttgtgctggtaattctccccgatgaatcatttcttgaatgatttgacgaataaagatgttcactttttgttccatcttaaagcctagatacaactgaacgttgacaatgtagtccgtcccaagcgtatctgcggtatattctgccgtatacggttcatcagtaacattgaccgcaacaaaccagtaaacttgcgcccgttttggtcgtttatccaaaatagaataaagaatattcttcttaaccatattcttttcatatggtttattctgtggttttgaaagataaaccaaattagtcgtatacatagctaacgctgtatcgtctcgcaaatcatgtagttgttgtttataagctagtaatgaaaccgtacttgccttgaaagtattactttccttaatcgtattactacgataccaaacaaacatgatcgatagaataaacgccgcaattaagactgtcacgtaaccaccatgcatgaatttagcggcacttgagatgaagaaaataacttcaattgtcccgaagaagatgagtaccaaataagccaatacccatttcttctcgcggcgtcccaagtaatggaatagcaagatagttgtcattaacattgtaatcgtaatcgccaaaccgtaggcagcttccatgtgcgctgagttcttaaaatagaaaacaaccattaaacaaaccgcccatagaatccagttaacgattgaaatatagagttgcccttttaacttagccggataatcgaccttaattcgtggtaagaggcgcaacttgattgcttctgatactaaggtatatgaccctgaaattaaggcttgtgatgcaataatcgccgcaattgtagccagtaaaatcgctgggacctttaattgggctggcatcacttcaaagaatggattgaaatcagaaatatgttgatatgccgcaatatctttatgttgtaataaccaaacaccttgtccaaagtaattcaacactaaacaaagcgcaatgtatggccaactaccatagatattcaaccgcccaacgtgccccatatccgaataaagtgcttcagcccccgtagttgccaagaaaacactgcctaaaattagaatccccaccttattctcagggctaaacagtagttcaatcgcataatacggattgagtgccttgagcatcgttagatcccccattaagttaaccaaaccaatgccaccaataaaggtaaaccaaattaacataatgggaccaaaagatttaccgattagatcagtcccaaatttctgaatgaaaaataagaccgataagatcgagaccgtcaataaaatcacctgatcttgattattaattaaaacgttcccattaattggcaaaccctttaacccttcaatcgccgtcgtgactgtcacagcaggtgttaacatcccatccgctaataacgtcgccccaccaataatcgcgggaatcacgagccacttagcttgcttacgaatcaaagtgtacagtgcaaaaatcccaccttcaccattattatccgcacgcaatgcaatcatgacgtacttgacggtcgtcatcaacattaacgtccaaaagacaagcgaaatactgccgatgataaaatcgcggctgatgtttgccaaaccgccattcccctcaacaattgatttcataacatataatggcgacgttccaatatcaccgtaaacgacgcccatcgtaatcaaaatccctgcaactgataatttatgtccagttgtttgtttagttgtctttaatttcatgatttgttacttccttatactccaatatagcattatcgtagcttgttccagattgaaagtccagtcttatcatcaataattatcaatccactgtattccatgctataatagggacactgaaacaagcgagggatacaaatgaaagataaacgtcaatttgaaattgctaagaagcaatacaagaaactagcgaaccgaccactatcaaaggaacgtaagaaagctgttagtaccgcttcaacttacatgttcacaatcttagttgtggcctttattctattggttatttacttgttcgttcactaaaactgcgtaagcagttttttttttcgtatttttttgcagaacatatattgaatattatttttcgtacgtatataattaaataaatagctttttaagcttaaattactacaaaaaacgcgaacattatcgagaaaggcggctctcatgccctcaaaaaaacaagtttatctcgctggcccattttttagccccgaacaaaacgatcggttagatcaagtggctgatttactcattaaaaacccaacgattgatgctgattcacttttcaaaccaggccaacacccttatcctgatgcagaattcggtactttcgaatggcaagtcgctacttttaatgttgatacgcgtcaaattgaccaagcagatgtcgtagtcgctgttatggattttaaatctgaagaaggcgaattcgaacctgattccggtaccatgtgggaatgtggttatgcttttgcccacaataaaccagtgattctcgctcgttttcgtgataatttaccaattaacctgatgttggctggttctgcaacggccatcttcaatggtgaagcggatattgaaaacttagcgacttatgatttctttgaattacacaataaatatgtccaaacagatatcttttaactcaaaaaagaaccgactgatgcgtcggttctttttctttggcctaaaagccgttattctcgctcaattcacggtaccatcgaccactcttcttcatcgtgcgctttgcctcatggtccaaatcaacacggtagaaaccataacgattccgataaccatttaaccaagaccaacaatcattgaaggtccaagtatggtacccaaaacaactgctgccggcttcaattgcgcgatgtagctgtgtcagatgttcttgcataaattcaatccgataatcatcttgaatttgcccatcttcacccataaagcgttcttcatcggcaacacccattccgttttcagaaacgtaccacggaatgttgtgataatcatttttcatcatcattgccacatcgtacaatgcttctggataaatctcccatccacgatatggattaatcttctgttctggccaaatataattagcatataagtcttccggtgtttgtgctgggaacttcggattctctggtgcttgaacccgcattggttgatagtagttcacgccgataaaatcgacacaatgatcggcaatcaattgccggtcgccttttttcgtcattggtaataactcatgttttgttaagaggttaattaattcttctggaataacgcccaaaacagttgggtctagaaaactcttagcgagtagtaagtcagcattttgtttagccattaaatcctctggtgcatcactcttagcgtaagctggcgtgatatttaaaataatgccgatctgaccatccggcttcacttttctaaattcagcaacagctgctgtatgcgccatcaaggtatggtagccaacctgaacagccttcttgaagtcaacaatgtctggataatgatagcccgttaagtaaccacattcgatatgcacgataggctcattaaaagtcgtccagcgatcaaccaagtcaccaaacaattcaaacgcagtttttgcgtagaatgcaaaggcatcaactgattcgcgtgtctcccaaccgcccttttccattagccaccaaggcatatcgaaatggaacagattaatgatcggtgtaatgtctgcatcacgtaagcgcttaaaataatcccgataaaaatcaaccgctacttgattaacatgtttgccatcgggcattaatcgcgtccaagcaatcgatgtccgaaatgagttcaaaccaatcttttgcatattttcaacgtcttcacgatacaaccgataagtatcactagccgtgtcaggcccttgatcgctattaaacttatcaggttgcatctcaaaccatttgtcccaggttgatggggacttaccataacttagggagtatccttctgattgaggtgcggatgttgctgctccccacataaaatgctctggaaatttaatcataaacgctactctccttaaatgtaatcgccaacattttatattgtaccatttctctaaagtggtcgcacacctttctcagtcgattatttaatatgcgtacctccgaaatattatacacgttaaataaattgcagactgagattaataatatgcattattataaaataatttattttttagggttttacacgtaaaagggttgtaaactcccgttattttatgatatattcaataacagaaatgattaatactcccccaagtaagatcatttcaatattcagaagatactcggtataggcctttcccaattaaggtttatgccgggtattttttgctttgaaagcaaaaaaaatagtcctgacggactatttttagaagcggtttgttatgcaaaaatcatttggaaaatacctgcgccacagatggcaccgataattggtgcaacaactggcacccaagcgtaactccattgtgagtcgcctttgttcttaagcggtgtgaacatatgcaccaaacgtgggcctaaatcacgagcaggatttaaagctggtcctgttgggccacctaatgaagcaactaatgtcatcaccaataaaccaacaacaatatggccggcagcgccaaacttacctgcaccaattgctaaagcaccgaaaactaagatcaatgtgcctaaaaattcatttacaaaaccattcatccggctatgagcagcatcgattgttacgaatgagcccaagatgccttcttggtttgttgtgcgatcataatatggtttgtaagcagcaaccaataataattgaccaaccattgcacccaagaattgaacaatgatgtatggtaaaacattttcccaagggaataagcccatcactgcaaaacttaatgtaacagctggattaagatggttaccggaaatgctcccaaacataacggcaggaatcataaccccacaaccatatccaaaagcgattaaaaaccaatcactactaaaaccttttgttccttttaattcaacgttggctactgccccgttaccaaaaataatcataattgcagttccaataaattcggcagccaaacgggttgtcaaagaagcgtccactactattcctcctataaatgattcatatttttacgtatcatattataatacgggaaaatgcaaggaaaaacaattgacttttctgtttaaatccctttcatgagaagattcatatttttacagacctttctgtaaatttgacttgctaatatctcataaaatgggataatattcattgattaaccatattaaccctgattatccgattactgttttggaggttactatatgaacttaatactcgccatcgttctttatgcaggccttgctgtctttgcatttggcattatcctactcctatttttcttaatttttaaaaaacggcttaaagcccctctaattatttgcttgattggtttgattatcgcggcatctcctgttggctataacttctacatggctcagaaagaacaccgcgaagaactagcgaagattgaaaagaaagataaaaaattcgataaagctgaacgccaattcatcaaacatattaaaaaatcgactgttgccactgaattcatcgctcaaaagtataataaagtttggggcgagttaacagaaaacggaacagttaacgtcgcaaatgttgattataacgatcatgatagtgctgttgctgctgaaggtcggcgtttactagcacaaggaaaactcgatgacgctgatgattactatgtcagtgctcaaggtgactaccaaaaaatgaaagactacgcgactgataacaatcgccaagaactcgtttacgccaaagatgtcttatccaagactgggtcgttcgtctctgttgcaacccgtccaaacggaactttccaagaatacactgatgatgtttacaaggctaatcaacgacatgtccgcgcaattcagaagttgaaattttcttacagtagtattaaatagtgaatatggtgattttgaaaaaaagatgaaatgggttacaatgaagtagaagactggggagtcttttattttttgattcatagttaaccctattatcgatttggagtgtgagaaatgcgtcacgtcaaattattattcatgattttaggtctaacttttattttaaccgcttgtgggaatcctgttaaagcaaagctccacgaaacaaacagtggcttcaatgcgcaaatcactggtaagactaagcataaaaaggtttattggcaaatcggtgataccattcatacgactaaaacaaccgatgatgctttcgcattcgaagtcccttacaaagctaagcagtaccggattacacttgctgataatgaagaaatgcgtaatccaacttatgttgaaggccctgtcgcaaaagaaattgtgcaatggccgaactttattcagatttataatccgattgcccaacaaaaaggactgggcgttttcgaagcgaatccacttgaaggcattcgcactgatcaagttgacagcaacaacgtgattgccatgaacgtcagtgatagcaaagtactggggatctcaattaaagctctcaacgcaggtaagaatctaacgtttaaaaactacgtcctcgccttttcaacaagtatcggaaccaaaccaacccagattactgaattggtcgaccgctcacttaagaaacctgggtcattaatgcaactgacggatcgcgaagttcgctataccgttatgacgaccaataacaacaagcaacaagtcacacaactttcaattaatcatttataaaaagaaagccgccgaatctacgattcgacggctctttttttatatagtggttaaaaaatttcgggagaaattattcacattcttgttatagggcgcagttcaatcaaagtaaacgatacggtcggcacaaattagtggtgccaaattgttatagtcactcaaccagctatcccctatcgaatttaaagtgcttatttacggcgtttcttcgtttaaaatgctatactgaaggtaaataaaggaggccttttttatgtttaattatcagcatattcttatcggtttagatggttctgagttatcagaacgcgctttcagtgaggcgattgaaattgctaaacgcaataatgccgaattagttgtggctcaaattattccagataccctttacacaaatgcacgcatgacttaccctgctgaaacaacgacatctgaaaaacatttcgttcaatcgtatcttgatcaaaaggtgcaattcgctaaagaacacggtgtccctaacgtacgagccatccttaaagtgggttcgccacgtcgtgaattagcctttaccatcccagaagaagctcatattgatttaacagttctcggtgtcagtggtaagggcgcctttgagcggctcttaatcggttctgttgcacaattcatcagtattcattctaacaccaacgtcttattaattaagccttaagccggtttaaagattggttaagtttaatgctttgtttttgacgtgtcccatttctaatatataataaaggtagtttaggagtggttcgaaatgccgtttgatatcactaaattgtctgatcaaaatattaagcgctggttcttacaacatcaccaagcaatcgttgcaacccttttgcacccaaacacttggtgggcaagttttaatcgccaattaatgcgctttttccaataatcactaaaagtgacgactgaatttgccgtggtcactttttttaatgacgtttttttaaaggagttctgaccgatgaccgagcaaacttatacttttacagcctcaatccaagccgcgacgattggtaaaggcggtgcatatgtctaatttcctggcgatatccgcgcaatattcgggaagggtcgtgtaaaagtccacgcccttttcgaccaacaaattccctatgatggcagtattgtcaatatgggacttaaaaatccagatggcaacatttgttacattcttggggtccgcaaagacatccgtgcacaactcaaaaaagaaattggcgattccatcacagttgaaatccgtgagcggctatagctattacgcccctttaaatgctatactattttaaatatttatttcgtcgactaaatttagaatgaggattatcaaatgccaaaacacctttacaagcgcgtggcagtcgttttaatactgattaccaccctttttttatggcttttcacaggaccggccagaagtgaggccgggatttggttcttccataaaaccacaccccaaaaaattgttaagaaaaaaacaccaaaaaaaacgatgctcgacatcacacctatttcacaatttcctgaattaccaaccggttgtgaaattacggctgttgccatgctgttagattaccgtggcgttgacatgagcaaaacagaagtggccgatagtatcccttatgtcaatgatggcgatatggaggtcggcttttgggggaatccatacgatgatactggctacactatgtatcctcctgcttggacaggattcttctatcaatatctcggcagtttcaccgatttatcggacgaaccgattagcacgctcaaagctactttaaaacaaaagaaaccaattgtcgcttggattaactaccataaacaaccagcgcattccgtcttattaattggctatgatcaaaattcatttacctttaacgatccatataccggcaaacgaaaaaaaatctcatttgataaattctggaaaattgctgcaccacagggacaccgtgcaatgacttattaatcattaacttgggggatttaacatgcataaacgaaccattgcagtcactttcattactttaagtagtctttcattagctagttgtcggtcaattaaacctgatcaacaagccgcaacccactccgaaagtttagcacgctatcgcgcctcatcagaagcaaaagaaagcaatcagcgtcgatcaatcgctagctcgaaagaagcttctattaaacaacaatcagaaagtatcgttgcagcttcagaatctattgaacaagcaaaacaacaatctaatcagtcaacaagtgccaaaaaagcgctcactgccgaccaacaaacttctgttaatcaagcttttctagcgtgggcggctgaacgcgccacaatcggaaacatggccgtcagtgattggtattttgaccacggtgctgccggatttggcgattggtttgccaattcacctgatggccgcattttagttcaacctgggacagcaagcccagggtttaatgcctaccctgttcatgcaattggtggctgtgtcttttataccgctttggatggaacagtcggtaaagacaatttagatcgtggatcattcgcggataattacagccttaacatggcaatggacaaaccggttagcaaatacctacttggtgataacggcgtcgtgtatgaacttaaattaggtaatggtcacctcacatcaactaatgatggtttcagcgaactaaaagatgacggcaaacaagcttactcagaaccacttgtctttgccgtttctgaagacaccgctgcccaagctgaactaaaatctttacttgctaactattagagtttaaaggagcacgactatgaacaatgccgaactacaggcctatcttgaagaacattcccgcgtcatcgatacatttcgagccaaaggtttagactaccaaaatgaaaagaaccaaaaacgccaacctgccaaacgttggaacgagaataaggtcgatcgggccgttgataaaatggtcgccgaatttatcgctagtattcaagtgaaaatggcattcaacattcgtggtgaacacgccaaagaatatcaaacttggttaacgttcattgaacaaaatgaagttgtcgaaggcttggaagaatcggttaatgaaatggcgtttgaatattagaaaaagtagtttcttttaacgaataattttccgaaaattaattgcactggataatattaagggtattgaattgttaattatccttgtgattttcttatcaatattatatgatttacttacgaaaggtggttttaaattatggttaagttattctttaacgagggctcaaaaattgcgctccaacaaaatgacacattatctgcctttggttctacgaatggttcacgccataagttgaccatcaaagactgtgctgctgcagatatcgtcgcaaaaatctcgcactttgttaaggacacgccggcttttatcctcgaaaatagtcctagcgaaacttatcacagctcaaatctcattatgattactacacgttaattaaaagactgccgttggctggtcttttttattttataactcaaaaacgccgctctcttgagcgacgtttttctttcagattaactttattgatttaaataattatataagccgcgcatggtcgcatccgccaacgttaatggctgcccatccaacgtcacctgcttaattgcgacgtaatcttcgaaatcgggtacttccagttgttgatttgcgacaaattcagccgctttttgataaaccttttcagcgttcgtttgaccgttgacatattgaatgactaacattgccatcatttccatttttacttttaatattattgatgaattggtcatctttgataaggtcattatacttcgcttactaaaaataagcaatttatatattttattctttatccgtattaaacaaaaagcatttaatccatttattttagaacaatgcaccaaatactgcaccatttcataaaatcaatagactaaatgctttaataaaagtcgaattttatctttataaacgttgaattataggcgttcgtttaattctttgcctaattcttcaaagccgggtttgcctaataaagcaaacatgttcttcttgtaagcttcaacacctggttggttgaatgggttgataccattcaagtaacctgagattgagacagccatttcgaagaagtagatcatgtagcctaatgtgtaggctgtttgatctgggatgttaactgacataacagggacgccgccatcagtatgtgctaagacaacaccttggtaagctttcttgttaacgaagtccattgtgtggccttctaagtagcctaaaccgtccaagttcttttcatcagttggaatatcaatgtcgctgttagggttcacaacgttgacaactgtttccatcaagttacgacgaccttcttggatgtattgacctaatgaatgcaagtcagttgagaagttagcacttgaaggataaatccctttttggtctttaccttcagattcgcccatcaattgcttccaccattctgagaaatattgcaatgttggttcgtagttttctaataattcggttgtgtaacctttgcgataaagaatgttacgtaaagcagcatatttgtatgcatcgtttttcataacgtctgtatctgtgtattcagtgcgggcatcagctgcacctttcatcaattggtcgatatccccaccagcaacggcgattggtaataaaccaacggctgttaatactgagaaacggccaccgatgtcatcaggcacaacgaattcttcgtagccttctgcatctgattctgtcttcaaagcgcctttagcacggtcagttgttgcgtagatccggctcttagcttcttctttaccatatttcttgatcaacttgtctttcaaaacacggaaagcaattgagggttcagttgttgttcctgattttgagataacgttgattgagaaatcgcgatcgccgatcaagttaactaagtcgtttaagtaacttgaactgattgagttcccggcgaataatacttgtgggaagtcacgttgttctgctggtaacatgttgtagaacgtgttattcaagaaatcaattgcagctttggcaccgaggtatgagccaccgataccaattgcgatgaaaatttctgaatcgctcttaattttagcagcagctttcttaatgcgggcgaattcgtccttatcgtagttcactggtaaatctaagaaaccacggaagtcgttgcctgcaccagtgccttcacgtaattgtgagtctgcagcattaaccattgcttgcatttctgcaagttcgtttgattggacaaatttgtccaaacgggatgcatcaaatgaaatatgtgccatatttgtcttattcctcctgtttttaaacacaagtatacgttaataactttagcttttttagcgctaaaaagcaagccagatcgaccgctttttcagactagacccacctttattttcaaaagaaaattactcaaagtccttgacttgtttcacccatcccgctatacttcaaatcatcaaataaaacggaggttactgaaaatgacaaacactcacttagtacaattgaatattcgttggcaaagccgctaagtgagattgtatgccgttatggatacagtcttttgattgtatccatgcggccattcatcagtaatcgattgaattttaagcctacatggattttaactcgaggaaatccatgtaggctttttctgtcccctacatgactgtcatgtgggggacttttttgtttgataataatgagtgcgttcaaaccgggtatatttcgaacactagcctagtggtgcgaatgaacgacgcagtcggtcgtttgtgcgacgtagctaggcacaggaatacggtttgaaaagcacgttaaaggagctttcgccatgtctaaactcaaacgttttttacccctcattctaatttttgggagtttgctcaccctacttggtatcaaaaaaatcaaagaagccaaccaacctaaattgccaattgtcggaattttacaacccttatctcatcccgcacttgatgaaattcatcgcgggattgtcgctggtctagcaagcgaaggctatcataacaaccgtaatatcaaaattgattttcaaaatgcgcagaacgatcaaagtaatttacgtctgatgagcaatcaattcgtcactgaaaaagccaaagtaacggtcggcattgccacccctgccgcacaaagcttagccaatgccactaagcaattaccgattatcttaggcgccgtgactgatccggcgagtgccaatctcgttaagaacaacgcccatcctggtgccaatatcaccggcgtatccgatcaagccccgattcaaaagcaattggcattaatgcaaaccatcatgccgcaactgaaaaccgtcggcattctctattcaagcagtgataactctgccaccagtcaaatgcacttattcaaacaacttgctgaacaaaaagggctgaccgttgttgaggccagtcttagttcagtcaacgatctggaacaagtcagccagaatctagtcccaaaagtcgatgcaatttacgttcccaccgataatacgattgctagtgcaatgggcaccctcgtccatgtgaccgacaaaaccaaaacgccagtctttccatccgctgaaacgatggttaaagatggcgggctcgcaaccgtcggcctaagccaatacgacttaggcgttgaaaccggtaagatgaccgccgctgttttaagtggtcgttcaaaacctgcaaccactccaattcggtatttacgcaaaggacatttagtcttaaacctcaaaaaagcaaaagccctccacatcacaattccgcagagtttaatgcaaatcgctaatcaaaaaggagctgttctcaaatgaatcttattatctcaaccattgaccaaggattattatggagcctactaagcctaggcgttttcatcacctttcgaatcttaaaattccctgacatgaccgttgaaggcagtttcccgttaggtgcagccctcagcgctttaatgttgcaacaacataacattgccttttccctattagtcgcattcatcggtggctgtttagccggactcgtgacggcaattttatacaactacttccatgtccagagtttgttagccgggattttaacgctaaccggtttgtattccgtcaacttgcggattttaggccaagccaacatggcaattggtgatcaacacaacctatatcaactgccgctattccatcaattaacgctcgatcaacggctcttagtcattaacctagtcatcatgctgatcgccctattattactggctggcttactctacaccgaattcggtcaatccctgattgcagctggtgataatcccacgatggccctctcacaagggattgccgtaaagcggacgaaaacgattgggatcgtgctgtcaaacggcttgatcgcccttgcaggtgggctcgttgcacaatataacggctttgctgatgtcaacatgggcatcggtgtgatggtcattgggttatccgcgatcatcattggtgaacggctccttgtcggcaagcatttcatcgccaaactaattagcattatcctaggaagcgtcgtctaccgcctcatcttactccttgtcttacaactcggctttaacgccaatgatttcaaactcttctcggccgtcattttggccatcttcatcatcgcaccacaacaaaagaaaggactgactaccaaatgaccccgcgtatgactttaaaccacctcaattttgaagttactgataataatgaacctaaacaactcttaaatgatttaaatctcacgattaatcctggtgaatttgtcgtcctccttggcgcaaacggtgcgggtaaatcgactttttttaataccattgcgggtgatttaacccccacaagtgggcaactactattcaacgaccacgacattacgaagcaatccgcccaacaacgcacacggctcattagtcgtgtctaccaagatcctaagttgggcaccgcagctgatatgaccgttgccgaaaatattttgttggcgatgcgccgtggccaacgccgccgcttatttccccgacgtctcaagcaacaactcccacaaatcaaagcgctcgccaagacactcccgaatcacttggatcaacaactcaatcgcccggttagtaacttgtcgggtggccaacgacaaacgttaaacttcttgatggcgacgattcaaaaacctgaattgctgttattagatgaacacacatctgctttagatgcagtttccagccaagcattgatgacttttaccaatcaaacaattcgcgataaccaactcacctgcctaatgattacgcatgatttagaggatgcgttgcaatatggcaatcgactcttggtgttaaaagccggtaaactgattgccgacttgaacgcgactgaaaagcaagcattaactgtcgatactttactagactatttaaactaatcaaaccgcgctaaccattttcggatagcgcggtttttgctgcttaaatccattcaatcttatcaagcaccaatttatcagcggttaattaattaaggatatgattaacctacgtttaacacttgtaatcgttttctaagtatgctaaattattcccataaggttgtgcgcaacctaattattgatttaagggagatctgtataatgacagttactactcaaaaaactattccagctagtgttgctatgcttagagttatcgaatcttggggcgttgatcatatcttgggttaccctggtggctcatttaactcaacaatgaatgctcttaatattgaaaaggatcgtttaaaatatattcaaattcgtcacgaacaagttggggcccttgccgcagctgctgacgctaaattaactggtaaaatcggggttgcttttggttcagctggccctggtgcaactaaccttttaactggtttatatgatgcaaaagaagatcatgcaccagttttagccttgattggtcaagtaccaagcaagaacatgaactacaactacttccaagaattcgctgaaaacccaatgttctctgacgttgctgtttataaccgcctcgttatgacacctgaaagcttgccatacgttgttgataaagcaatccgtgaagcttacaaacacaatggcgtcgcagtggttgttattccaaatgacttcggctacgttgaaattccagatacaccatatagctcaagctcaccttcagatcgtaaaaaagtggctggtccagtcgcaacagacgaagaagttgatcaattcttagcaatggttaaagacgctaaacgccctgtaattcacgttggtcgtgggattaaagacggcggcgacaagctcgttgaattatcaaagaaacttcaaattccaatcgtcatgactgggcttgctaaagggttagtgcctgatagttatgaaggtaacttaggcatggctaaccgggctgcttctaaagcggctgatgaaatcatggccgttagtgatcttgtgattgccatcggtgctgacttcccatttgccaacttaatttatcggacacatgacttcaagtttatccaaatcgataacgatgaagcacaatttggccgtcaccatttcttagacttcgggatctggtcagatgcaactgcttttgttgaaaaagtaatcgccagaagcgaaacggttgccccaacaccattcttcaaagctgctgttgctgatatggcaaactggcaagcctatcttgatgttttaacgaaccgcgactctgatccgcttgaattcgaaccaatctacaaagaaatcaaccgaattgctgaagacgatgctgtcttttcaatcgatgttggtgataatatcatcaacagtttccgtcacttgaacttaacgcctaagaacaaatgggtgatttctgccctctttgcttcaatgggttcaggcgttcctggtgccttagctggtcaattgagctacccagatcgccaagtcttcaacatctcgggtgatggtgccttttcaatggtcatgcaagacttgatcactgaaaagaaataccaattaccaatcattaatatcatcacatcaaatgccgcattaaacttcatcaagagtgaacaagatgatattccaatggattactcaggaatcttcattgaagatcaagattttgccatgattgcgcaagcaatgggcattgaatcaatcaccgttcgttcttctaaagaattacccgctgcctttgacaaagcccttgaagtcacaaaagctggccgaccattcttaattgatgctaagatcactgacaaacggagtattccagttgaagaattagaactaactattaaagatggtaagataacagaaacaattagcgcaagctatgatgcttctcgtcctgctggcaaagaatacagcgtggctgatttcttcgcagaatacgatggtcaatcactgaagacattaccagaattatttgaagaaaacggtgttgaactataaaacaacccggccatcataaaaatagcgtctcaacacattgcggtgtgatgggacgctatttttattgatttaatttttggtaatggcttctttaggatggaaccaaacgacgttcttgtcgaagaatgagactaagtcgtttgataagtacaagatataggtgaagaataagacccaatttgagccaccctgcattgctgtaatgccccacaacgtgattgatacgatactttggatgaaccagaagtaatagctttctttaaaccgtaatgtggtcaacagtgcgccagtaaacccaactgaagtggcgatactatcgatcaatggtcgtggactgtccgtcatattgctttcccagagatataataacccgactgatatagcaaagaacaatagcgtcaacgcccaattacgaagtcctttaccacgagtagcaagcccccggacttttttatcaacgttttgcgcccaatctggcattaataagactgggatgtctaacataataatgtagacggtttgtaataacatatcgttatagtttttagcattataagccacaataatgtagattaatgcagagatgacaccaaagacaccgtttaaaggtttcgtattcgtaatactaatagtacaggtgaagcctaacatccccgcgagcatcgttaaaaacgacacgccagtcattggaccaccggaaatagtagcagctaaaataaagcctaacccaaacatcaacaaaccataactggatgttatctatcaataaaggctgagcaatagtgctcgcctttttatttggtttcaacatttgataatccccatttccgtggtagtctgtatataaagcattatcagatggaggttaggcaaacgtggaaaatggacgacttagacgtgctagtcagtttaataagacacggtttcgctttgtgggcaaagggttattagttggggcgttcactggattggtggtcagtttatttcgcttagcgattgaaaaaggactggcctttgttatcactatctatcaagggttaaatgcacacccgtggtattgggtgccattggttggtgccaatttattgatcggcctgcttgtggcacaattattaaaaaaggaaccgaatataagtggttcggggattccacaagttgaaggacaattggaaggtgagtttgatttcaattggtggtcaatcctgtggcgtaaattggttgggggcattttaagtattgcacctggcttattcttgggacgagaaggcccatcgattcagctgggggctgccgttggacagggggtcgccgctaagttgttaaatcgcggtgctgatcgtcggattttaatcgctagtggggctgccgcgggcttatcggctgcgtttaatgcaccaattgccgggacctttttcgtactagaagaaatctaccataacttttcaccgttagtttgggtgacgtcgcttgctagcgcaattgcagcgaacttcatttcattaaatttttttggtttgacaccgacattacatattacgtactcccaaagtttgccaattaatcagtattggcatttgttgatacttggtgtcgtattaggactgttgggatacgtttatcagaaggtattattgtggttaccacaactttatgcgaagctcccgctgccaaaagcgtataccggattagtgccattattatgtgttttgccgattggttatttctggcccgaaattttgggtggtggcaatggattgattgcacaccttggacaaaatttaccgacaatcagtgtggtagccggtctattcctattacggtttgttttttcaatgatttcatacggttcaggattacctggtgggatttttctaccgattttatcactaggagctttaatcggtgccctttatggactcataatggttcaacttggttggttagcaccagtttatgttcccaacttaattatttttgcgatgggtggttactttgccggaatcgggaaggcgccatttacggccattctactagtgaccgagatggtaggttcgctcgtgcacttgatgccattagcaattttatcgttggtggcctacatcgtcgttgacttaatggggggcgcgccaatttacgcatcattattgcaacgcgcacttggcaaaccatatcgtaagttagcaacattctctgatcgcttggaggtaccagtgtttgcgggcgcaccgttagaggatcgccaagtccgtgaagtggactggccaaagacatgtttgttaatcgcgattgttcgtggcgaatccgaactgattccgcatggtgatacgttgattcgtgctggtgacacgttgattgtgttaacggatcatcagctacgggcgacggtgcggcggcaaattgaagacgctgcccaagccttgcgaaatacggatgagaatctcgtgaaataatcgataaaaaagtggtgattaactactttttatgctaaagtattaaaagacagtgtagatagaaaggtagggaattaggttggaaaatcttatcctgaacttattattaatcgattcaatcttgattgtgatcgcagtcatgatgcaaccaagtaaacaacaggatgctttgagtgcgttatcaggtggttctggtgatttatttggcaagcaaaaggcccgtggtttcgaagctttcatgcagaaagtaaccgttgttttaggggctttattcttcgtctttgcattagctttagtgtacttatcatcacactaatacatgtgagacgggtcgaattctaataagaacgttgatgcggtctcctgttgaatggcaggagacctttttaaatgaattcaagcagtaaggactttgggggtgagcgcatgtcttatcggttgccgcaaccgttttattttgacggtggttcagtcggggttgtgttgttacatgcttatacaggtagtgcgaatgatgtccgtatgatgggccgctttttggagaaaaatcagctggcggttagtgcaccacagtttgcagggcatgcaacggctgatccaaccgagattttaacgcgcggttctgtcgatgcatggtgggccgatacggtggctgcgattgagcagttatccgcggctaacaaacaactgttatttgttttcggattgtcattaggcggattgtttgccatgcgggcattagaagaactaccacaagtttgtggtggtgggatttttagtgcgccagtactcgaaggaccgactgctaaattgacgccgctctttggccaatatgctaatcgaatcatgcagttaatgggcgtcccggctgcgcaacagacagcacgtttggcgactattaatcagcaattaccacaacaacttgcatcaattggcattttcagtcgacaagttgtggctgacttgaagcaaatcggagataaaccggtcttcatcggtcaaggcggacaagatcaagttattgatccaacacaagcccaagtcttacaccagcaattaacgcaacaaaacataacagttgattatcattggtatccacaagccggccacgtcattacggtcgatagtgcgcatcaccaattagaaacagatgtcctagaatttataaaccgttttaagaaatgagaaagaggtgttgatgtgacacaagttgaacagatgaaagcagcgattcttgcaatttttgaagcagatgcaacgcaacaattaaacgtatccgaaattagtgaacgaatcggcgttgccggttcacaagggttcaaagacctagtgaaagtattagcagaattagaaggagataagacattgaatatggacgatgccggtaagttcagattaccagctagcaaccgccttgttgaaggggtcttccatgctaacgatcgtggctttggcttcgtttcaatcgttgataaggaacctaatgatccagatatctttatcgccccacccaatacgaattttgcgatgaatggtgacacggttgaagtggccatcattaaagaagccgaagaaaacagccgccgcggtcctgaaggaaaagtggcgaaagtgattacgcgggggattgaagaaatcgtcggcgaattcatgccttattcagatatccaaaaagaaaaaacaggctggattggatacatccaaagtcatgccaaaaaattaagtaattaccgaatttatttaacggataatgggttacatccacaaaagggtgacatggtccaagttgacgttaccggttacccaagtgttgaggcgccaggtcaaatgctggggattgccaaacaagtacttggtaacaagaatgatcccggcgttgacgttttatcaatcgtgtatcaacatgatattaagacggacttcccagaagaagttcggcttcaatcagaagcgattccagatacggttttagaatctgataaactaggtcgtaaagatttaacggatcaagacgttgtgacaattgacggcgacgattctaaagattttgatgatgcagttaacgttaaaaagttggcaaacggcaactactacttaggggtccacattgctgacgtgagttactacgtcactgaaggttcaccattagacgttgaagccttagaacgtgggactagtacttatttaactgatcgcgtgattccaatgttgccattccgcttatcaaacgggatttgctcattaaatccagacgttgaacgcctcgctttaacgtgtgaaatggaaatcaatgaacacggcgtggtagtggatcacaagattttcccaagtgtgattaagtcaacagcgcggatgacatacaaaaacgtcaataagatcttaacagatcaagatgctgacttacgggcgcaatacgaacggctcgtgccaatgtttgaaacgatgtcagaattacatgaaattctcttgaagaagcgtcataaccgtggtgcaattgatttcgaagaagacgaagctaagattatcgttgatgaaaatggcaaggccatcgacatcgaattacgccaacgcggtctttcagaacgcatgattgaatcatttatgttggctgctaatgaaacggttgcagaacattacagtactgctaatgcacctttcttataccggattcatgaaacaccagatgctgataagatgaagaatttctttgaatttatcacggcttatgggattcaagcacacggttcaagtaagaaagtgacgccaatgatgctccaagaagtcttgacgcaaattgaaggtcaacctgaacaaccgattattacaacgatgttattaagaagtatgcaacaagcacattattctgatgaatcccttggtcactttggtttgggtgcggaattctacacgcatttcacgtctccaatccgtcgttaccctgatttgatggttcatcgtttgattcatagttatgccacaaatgggatgacgattgaagaaaaagaaaaatgggcacctaagttacaaccaatcgcagaacaaacatcccttgaagaacgtcgctcaatcgatactgaacgggaagtcgttgatcttaagaaggctgaatacatgcttgataaggtcggtaatgaatacgacgctgtgattagttctgttaccagctttgggatgtttatcgcattaccaagcacggttgaaggcctcgtccacatctcacagatgaaagatgactactatagctttgttgaaagccaattagcccttgtcggtgaaagaacgcataagatgttccgcattggccaaccagtacgggtcaaggtcgcgaatgttgatttagatgcccactcagtggactttgaattattagccggtgaagaagtgccattggcttcggctgaaatcttaagcaagattgaagcacgaccaaagcgtccagcacgcccacgtgatcatgaaaaaggcggtcaacgtcgtggtgatcaaaagaaaaacaatcatccaagacgcccagctgcgaacaaggactcacaaaaacgtacttttaaaaagtaggtgattgaatggcaaagaaacatcctcaaaaaccagcaaatttaattgcacagaataaaaaagctggtcacgattataatattttggaaacattcgaagcaggcttagtgctcactggtaccgagattaaatcggtccgtaagggcaaaatcaacttacgtgatgggttcgcccgcgtccgtaaaggagaagcctatctcgaaaatgtccatatcagcccttatgaacaaggcaatcagtttaatcatgacccattgcgcaaccggaagctattgttgcacaagaaggaaattaccaagattggtgctttaacgaagaataaggggattacgattgtgccgttacgggtttatttgaaacacggctttgccaaagttttaatcggcgttggtgaagggaaacgggaatacgataagcgcgaaacactgaaacgaaaagaacaagatcgtgaaatggcccgcgcagttcggattaaaggttagtcctttaattaaaatctaagtataaagtcaaaaagctatcacaaaatttacttttgtggtagctttttctattggaagtatttggtttgtcggcggttacaagtgggtttttattacacaaaaattataaatgtcttcaaactgtaatataacgtcattaatctgcaatcttcttgcggggattgttgcgtataatcaagtctgagttatgaatggaggagtttaacaagatgcgatttagaaaactagcgttagctgttgttacctgtttagttgcaatggttacgatgggcacatctgttagtgctgccagtttgagcgaattacaagcccaagaaagcagtacccaaaaaagtattgatgatacaaattcgaagattcaagccactttaacgagcgtgaatgcgaagtatcaagaaattaatgccttaaaggaaaagattaaggataacgaaaaaaatatcgaacaagcacaaacgcttttgaaaaagcaacaggccactttagcaaaacgtaaaagctatgctaaggaacgcttgcaatcacttcaacgaacagccgatgaccgcaacgttggcaacgcactattgtcagctgattctttgagtgatttcttcaaccgggcttacacattgacggttcttcaaagtgctgacaaccataatatggatgaattagcacagagttatcgtgatacacaagccattcaagataagttacaagctagcaagacagaacttgatgaacaacgaagcagtttggatcaacaatctgtcgaactggaacaacaagtggctggcttaaagaataatttaagtcaaagccaagcggatcttgcaaaaattgctaaagaaaaagcagaagaacaagcacgtgaagaagctgaagccaaagcggctgaagcagctaaaaaagcggccgacgaagcagcacaagcgccaattgcaccagttgtggacacaaatgctcagcaagccgatttagcaagcgctactgatggcaaggccggacaagctattcaagtgcaagcaacggcttattcaactgcccaacctggtttaagccattttggtgcaactggaattgatttaactaaaaacccaaattgtatcgccgttgatcctagtgtcattccattaggctcacttgttttggtacctggttacgggtatgcaattgctggtgacacgggtagcgcgattaaaggtcacattattgatgttcattttccaactgttgcggcatgtaagagttggggtcgtcgtcatattacaatcacaattattaagtaattttaaatacagccttttttgaggctgtatttttttacttcgtggattgttttggtaaaataaataataaattatatttaataaaggttgtcagggcaactcataatgaacgttgttgatgattattagtgaaagttagttgaaatatataatttaatactatagactatttatattgctttaaatcgaagtacggttaagattagctgactaagtattatttagatcggctatcttagaacacggaagaattgaagtactgaatagtgtgagtatgaaacttatcgatggttaactattgatactgaaagtttcagcatgtaggaggaatagaaatggatacgagtaataacaccgatttactcggtagcacatcagcagattttatggaattcgcaggtttataccggtggttgattaacaaccttagcgaatcaatgagtcgtgaaagccaaaaatacggtttatctttcgaccaatttttagtgatgcacgagattcaaaatgcgaataatgaaacaactaacagtgcattggcagataagatgcaagtgagtcgttcagcgatttcacgtcaatgtcgttcattacgtaagatggcttttatcgcagaacaatctgatgaaaatgaccaacgcattcgtcgtgttcatttgacggaaaagggtttggaagtttatcgtcatctcttgttctattacgtagacttgtacaaagatttacaaaatgaaatcggccaagatactgttggcgcaacaatcgaccaaagcaaaaaaatctttggtcgcatggcatcaatgaacatggatcgcccagaagcaaaataaacgttaaaaaaggccgcaaccatttgttgcggcctttttttgtgcgattagcaacggtcgcgcataatgacgcgcgtcactttctttgttagaatagagctagtcactttacgaatgtaggaggaacaacatgggttctcaaaaaaaattattattagtcgacggcaatagtgttgcatttcgtgctttttttgcaatgcaccaagctttagaccatttcaccaatcaggcaggactgcacactaatgcgatttatgctttcaagaatatgttggatattattctgaaaaagattgaaccaacacacgtgttagttgcttttgatgcgggcaaaaccacttttagaaccgaacaatttgccgactacaaagggggccgttcaaaaacgccacctgaattaacggaacaatttccttatatcagagaactcttaacagcatatggtattcagtcttatgaactcgctaatttcgaagcggacgatatcattggtacacttgctaaacaagcagaagctgatggtttcacggtcgatatcgtcactggtgatcgcgatttaactcaattgacgactagtcagacaaccgttaacatcactgttaaaggggtcaatgaaattgaagcgtatacccctgaacacgttcaagaaaaactcggtttagaaccaagccaaattatcgatttaaaaggattgatgggcgatacctctgataattatcccggggtgacaaaggtcggggaaaagactgcgcttaaattgattacggaatttggaaacattgaaggtgtctatgaacatgtcgatgaaatgaaaaagagtaaattgaaagaacatttgattgaagatcgcgacctagctttcacgagtaagacactggcaaccattaaacgtgacgcgccaattacgattggcttagacgatgtggtgtacaacggacctgatatggcagctttggttgctttttaccaagaaatgaacttcaagtcgtttctaaatcaattagatgttgcaccagttgaacccacggctactgaagactatcaatttacagtattaacccttgataacatcaccgatgtcgtgacaaccactgaaaacgttgcgtttggcatcgaaatgttaaccgacaattaccatacagcagacttgattggcttttacattggccgaccagaccactggtatgtcagcgacgacgtaacactcttgacagaatcggttttaaaaacgtggttagaagatgctaaacgtccgaaagcagtttttgacgtgaaacgcaatcaggttgcggtgaatcgcttagggattcacttagcgggggttcaatttgacttactattagcgtcttatttgttgaatacaacgaataacagtaatgatcttggaacggttgcaaatttacatcagtatcaaaatgtccaaacagatgaagctgtttatggcaagggggctaaacgcgcagtccctgtcgatccaaccgtgctttatcaacatctgattcaaaaagcagcagctatttacaaattagcaccacaattgacagaacaattaaaaaaacatcaacaattcgatttattcacggatatggaattgccattagcgctagttttagcggatatggaaatcaccgggattcgagttgatgcaagtcgcctacaacaaatggggggcgagttcagtcaaacgctgaagattttggaagaaaagatttatgcggaagctggcgaaacgtttaacatcaattcgcctaagcaactgggcgtcattctattcgaaaagatggggttaccagtgattaagaagaccaagaccggctattcaacggcggtggatgtcttggaacaacttaaaaaagacgcaccaattgtccaaaccatcttggattatcgccaaatcgctaagattcagtcaacgtatgtcgaaggattattgaagtcaattcatcaagataataaggtgcatacgcgttacttgcaaaccttaacgcagactggtcgcttgtcatcggttgatcccaacttacaaaatattccagtccgtctagcggaaggccgtaagattcgccaagcgtttgtcccaagtcaaccgggttggcagatgtttgcttctgattactcccaaattgaattacgagttttagcccacatttcgggggatgccaatatgcaagaggcattcaaggaagaccgcgatatccatgcgaatactgcgatgaagatttttggcttatcgagcgctgatgaagtgacaccagatatgcggcgccaagcgaaagcaactaatttcgggattgtttacgggattagtgactatggcttatcacaaaatattgggatcacaagggctgaagctaaacgctttattgaagcgtattttgaacagtatccaggtgttcatcaattcatgcaagatatcgtgaagaaggcgcgcgaagaaggctacgttgaaacgctcttccatcggcgtcgctatttaccagatattcacgctaaaaacttcaatttgcgctcatttgcagaacgcacggcaatgaataccccaattcaagggagtgccgctgatattattaagatggcaatgatcttgatgcaagcggaactgaagaaggcaggattacaagccaagatgcttttacaagtacatgatgaattgatttttgaagcaccagaatcagaaataccaatgttagaaaaattagtaccaagtgtcatggattctgcggtttcattagcggtgccgctgaaagttgaaagtggctttggaccaacttggtacgatattaagaaataaggggacacacaatgccagaattaccagaagttgaaaatgtgcgccgcggattggaacaattagtggtcggtaagacggttcaagcaattgagattcgctggtcgaaaattatcagtaatccagacgatgtttttgttgaaggtcttgttggacgccaaattatcggtgttgatcgacgcggtaagtatttattgattcgtttcgatcaaaacttaactgttgtgagtcatttgcggatggaaggcaaatacgaagttgatgatcaatccgtaccaatgactaagcacacgcatgtgatttggacatttacagatggacaacagttacgttatcttgattcacgtaagtttggccgaatgttattaattgaaacgggtcaagaaaacactgtttctggattgaaggacttaggggttgaaccaaccccaacaacgtttaagaaaaccgccttctatcaggcgttacagaaacataaaaaagcgattaaaccactgttgctggatcaaaaaattgtaacgggtcttgggaatatctatgtggacgaaacgttgtggttgagccagattcacccagaaacaccggcgaatttattgacgaaagctgaaacagatcgtttgcatgatgaaatcatcacagagttagaactggcaaccaataacggtgggacaacagtcaatacgttcttaaacgcggcgggtcacgctggggcctttcaggatatgttgcacgtctatggtaagaaagggcaaccgtgtgatcggtgccagactccgattgagaaaattaaagtagcacagcgtggcacgcatttctgtccgcggtgtcagattaagagagaagcggttcaatgacgtattttctaggtttaacgggtggcattgccagtgggaagtcgactgttgcggcattgtttaaagaacagggaatcccggtgattgatgctgatcaagttgctcatcaggtattagcgactaataaatcggtacaggcacaattgcaagcagcctttggcgaagcagttgtcaaaaatggtcaagttgatcggcctatgttgggccagcaagtcttcggtaacccagaggctttgactcagttaaatgcgattactgggcccgctattttgacagccattaaacaacagatgcaagcagcagatgcaccgctggttgtgttggatgtgccactgttatatgaacaacactacgagcaatattgcgatggtgttgcagttgtctacgttgaacgtaaaacacaattgcaacgtttgatggcgcgtaaccaattgactatagaacaggcaaatgcgcgaattgatagtcaaagtgatttggcgaccaaaaaagcgcgagcggatttcgtgattgataatcaaggcacacctgcaatgttgcggcaacgtgttttggcgttgttacaacagttgtgtcataacaagtaatacaagcggtcgaacagattattctgttcgaccgcttttttgtttggaaaaggcgaaatgccttgagactgatacattttttgtttagcctgcttgcctggcatgttatactactgttatactaattgttttaaaattggattgaatttgaaacgaattaatcaaaagataagaaggtgtcattatgctatgtccacattgtcatcagaatagttcgcgggtaattgatagtcgtcccacggatgaagggcgagtgattcgtcgtcgccgtgagtgtgagaattgtcgtttccggtttacaacgttcgaacgagtggaacaaaccccattgttggtaatcaagaaaaacggaacgcgcgaagaattcaaccgtgataaattattgcgcgggctaattcgtgctgctgaaaaacgccccgttacaatggagcaaatgactgaagtagttgatgaagttgagaataagattcgctcattgggtgaaaacgaagtctcttcacaagccgtcggagaatacgtgatgcgcttgttaccagatattgatcagattgcctacattcgctttgccagtgtttatcgcgaattcaaggatatgaatgtctttatgagtgaattacaagaaatgatgaataaagaaaagacgaagaaatcgaattaaggaagaggggttagccgatgtcagatgcatttgattttttgagtccaaaagacggcttttcagtgacaaaagctaactatttgaccgatttcgatcaaacagtcgtcacttacttatatcaaccattaatgggggctgttgcttacagtctctatcttttgttatggagtcaaaccaagaaagaaacggaacaacattttcaaacacatgcgactttgttaaatctgttgagtgttgatttacctgctttttatgacagccgcagcaaattggaagcacttggtttaatgcggacgtatcaaaaaaatgagggaactggccgcaagttggtgtatgaactgtatgcgccattgcaaccacaagctttttttaacgatgatttgttaagtgtggcattgttcgaagcggtccgcgaaacacggtttgtggaactccgtgactatttcaagctacgaccggtttacgccaaggattatcaagaggtcactaagaatttcttgaccgttttccatgtgcaaagcgatttattgacgaacgtgccaagcagtgtggctgaaactaaggcaatgtatcaacaaaaagcagctagcacaccgcagtttacctcggttgagttgcggacttttgattgggacctattacaagatgcaacggcgcaataccagattgatacggatcaaattctcaaaaatgaacagggcttgtttaatctccattatttctatggtctagatgagatggacttagcgcgtttgattggcttgacgatgaatgttgctgacagtacgattaatatggcagcgctcgaacagaacgtcttgaacaattacacacgacgtcagagtaaccggcaaacgccagctgctacaacaacgcaaaaaccgttagccgagttacaaaaagaatggcaaaaagccggctttaacgaacaggaattgcagtggctaacagaaagtcagggctacttgccagttgattatctcgaatacttgaaacaaaagaaccacggctttgtcgctaaaaatgaaatccgggcgttaaaggacttgcaaaaccgctatatctttaacaatgatgtgctcaatattttggtcgtttatatcattacgcaatatgatgggctcactcaggcgctagtcgatcggattgcgaaccagtgggctcaacaaggggttaagacggcagcggatgcgattttgcagattcgcgatttccaaaccaaacagacggcaaaggtgcaaaacaatcgccaaacgcgttatcagaacaaaactaaaaaagaaccagtacctaaatgggctaaaccagattatcaagcgccaaaagaaacaaccacacctgagcatcagcatgaactagaagcggcgttgaaaaaaattcgtgaggggcgggaatcgtaatggaaaatatgggtaaagatttgacggattacatgaatcggcaaaagttaaaccaacagtttaataaattggtcgaagatgccttgaacgattccgatgtccaagcatttatacaagctaacaaagaccgcttatcacaagaaacggtcacgcgtagtgccgctaaaatttacgaatacgtcatcgaaaagaagaagttagctaatgggcaaaccactttggcaccgggttatgcgccaaagttagtcttaaataaccattttatcgatgtcagttatgagcctacggtaagtttattacaagagcgcgaacaagctgccttgcatgcacgagtgaagtcaattaatatgccgcgcgatattgaacaggccaagattgattcatacgatccaaccaatcggtttgacgcattgatcaaagctaccgcgtttatcggggcttatcggcaagcaccccatgattttcaccaagccttgtaccttagcgggcaattcggggttggcaagacttacttgttaggtgcgattgccaacgaactggcgttatccgggtttgaaaccacgttgattcatttcccgacatttgcagtggagatgaagaatgcaattgggcaaaacaatgtgttagaaaaggtcaacgtgataaaaaaagcaccgattctgatgattgatgatatcggtgctgatgcaatgagtgcgtgggttcgggatgaagtacttggcattattttgcaatatcgaatgcaagaacaactcgccaccttcttcagttcaaacttcacaatgactgaattagagacgcatttgacaactagcaaccaaggagacgaaccggttaaagcggcccgcatcatgcaacgtgtgcgctatttagcgcaagaaattgaagttggtggtcaaaatcgccgcttacaaccttagtaatttaggcttgctaaaaaagcaattaagtgttttaatagaatcaatcaatgatgaaagacaccttttaaatgaaccatcgcagagagaaaaacatagctgaaagtttttcacccccatttaattgaccactttcaaaggcaatacaactgatcgggtcgtttccgttatagacgcttaaagttggagaaccaaatgttggggtctcaatctgggtggaaccgcgaaattaattcgtccctgagctgcacaattcgtgcgtctcagggactttttttattgttgatgacaaattagaaggagtgaatagtaatggcagagattcaattaacttttccagatggtgcccaaaaggcatttgaacaagcaacaagtcttttagatgttgctaaatcaattagtacaagcttagctaaaaaggcaattgccggtaaattgaacggtgaattagttgatttacagcaaccaattttagaagatggggcaattgaaatcatcactaaagacgacaaagcaaccgatttgatggcaatttggaatacggcagcctttgttttagctgcaacgttgaaccgtgcttatcccgagatgcaattcggcgaagtacatgcaactgaagatggcttcttctatgataccgaaaacgaagctggtcaagtagctgtgaccgacttaccagacattaaaaaagcaatgagcaagttaatccaagctggcggggcaatcgaacgtgtcagcttagacaaagctgctgctaaaacactatttgctgggcaaacttacaaattagcattattagatgaaatggaaacagaccaagtcttagtttacaaattaggcgattttgctgattttgggttagcaccaatgctagctaaagtgagcgacgttaaggtctttgaactcttatcggttgccggcgcttattggcaaggtaaatcaagtaataagatgttacaacggatttacggaacagcttacaacaaacaagctgacttagatgctgacttacagcgtcgtcaagaagctaaagaacgtgatcaccgtgtgattgggaaccaattagacttattctttgttgatcctaaggttggtgcgggcttgccttattggttgccaaatggtgctaccatccgacgttcaatcgaacggtacatcattgataaagaagttgccaatggttatgaacatgtttacacaccaattctagcgaacttagatttgtacaaacaatcaggtcactgggatcactaccgtgaggacatgttcccaccaatggatatgggcgatggcgaaatgcttgaattacgcccaatgaactgcccatcacatatccaagtttacaaacaccacccacgttcatatcgtgaattaccaattcggttagctgaactagggatgatgcaccgctatgaaaaatcaggtgcgctttcagggttacaacgggtgcgtgaaatgactttaaatgatggacatacattcgttcgtcctgaccaaattcaagatgaattcaagtcaattttgaaattaatgattgaagtgtactcagacttcaatatcaacgattatacattccgtttgagctaccgcgatcctgctaataccgaaaagtactatgctgatgatgaaatgtggaacaaagcacaaacgatgttaaaaggtgctatggatgatcttggtttagattacgttgaagctgaaggcgaagctgctttctacggtcctaagttggatgttcaaacgaagacagctatgggcaatgaagaaacactttcaacaatccaattagacttcatgttaccagaacggtttgaattacaatatgttggcgaagatggcgaaatgcaccgtccagttatgattcaccgtggtttagtatcaacgatggaacgtttcacagcttacttaacagaaatctacaagggcgctttcccaacatggttagcaccaactcaagctgtgattattcccgttaagaatgaattacattatgattatgcaaagaacgtcaaagatgcgatgattaaacatggtttacgtgtgcgcattgatgatcgtaatgaaaagatgggttataagattcgtgaagcccaaacaagcaagattccttatacattagttgttggggatcaagaagttgctgacgcaacggtttctgtccgtaaatacggtgaagaaaacgctgctgaagaagcttcagatatgtttgtagatgcaatcgttgctgaagttggtaactacagtcgcgatggtaaagatcacaaaacaatcaacctataagcggttattaaaacgtccgaaatgttattttgacatttcggacgtttttttgtttttttaattgcgcacaactaaaaaagcggtataataaatatgtaaacgattccaatcgttgattaatgggaggcgttattatgacgacagaaaaatatcaagcaggttcagcagagcaaccattggacattattaacctctatgacttggaaaaagaagccggcgaagttgttcccaagggtggctttgggtatatttacagtggcgcgggtgatctttataccattaacgaaaatattacggcatttaatcacaaatacatcgcaccacgggttttacaagatatcgaaaatccagatacaactaccgaaatctttggcgatcacttaacatcaccaatcattatggcacctgttgcagctcataagttagtgaatactaaaggggaagcggcaaccgctaaaggtgtggctgattacggttcaatcttaaccatgagttcatttgcgtcagcaagtatcgatgatatggcaaccgcagcagatggcgcaccgcaatggttccaactctatatgagtaaggataacgatatcaatcgtaagattttagatgaagcgatggcgcataacgttaaagcgattgtcttaacagctgatgccacagttggtggtaaccgcgaaaccgataaacgcaatcattttacattcccagtcgggttaccaatcgttgaagcttaccaaacaggtgtgggccaaacaatggatgccgtctacaaatcagctaaacaacgtttgaaccctaaagatgttgaattcatttctgaatacacacatttaccagtctttgttaaagggattcaaacagcagaagacgttgaaattgcacttcaagccggtgctaaagggatttgggtatccaaccacggtggtcgtcaattagacggtggccctgcagcctttgattcattacacgtcgttgctaaggcagttaataaacgggtaccaatcgtctttgatagtggtgtgcgtcgtggtcaacacgtctttaaagcattggctgaaggggcagacatcgttgcaatcgggcgcccagtcatttacggattagcacttggcggtgcacaaggggtacaaagtgtctttaactacttgcaaaaagaattagaattagtcatgcaattagctggtacacacaacattgacgaagtaaaagccacgcacttagtggacaatcattacggcaactaagtacacgtaaatttaaatgcgggatttccttgactttaaattcctaaccgagtatacttattttcgttgagaaataaagcagaagttcccgcttctcgccttagtagacacttgatgtctctgggctgatagtttctaattcggacgaactaagtaaccgaacaagcgggcctttctgttatgagagggccgctttttttattacttagctgcattttctctctaaactttatggaggtgaagagtcatagcaaaagatttgatggttaacgatggtattcgtgcacgagaattgcgtttgattgctcaagatggcgaacaacttggtattaagagtactcaagatgcaattgcattagctgatcaagctaatatggatgttgttttggtttcaccaaacgcaaaaccacccgttgctcgtattatggactatggtaagtaccgtttcgagcttcaaaagaaacaacgtgacgctcgtaagaagcagaaaaccattaacctcaaagaggttcgtcttagtcccacaattgaacaaaatgattttaatactaagttgaacaatgcacgtaagttccttggcaaaggcgataaagtgaaagcttctattcgtttcaaggggcgcgcaattacgcataaagaaattgggcaacgtgtattggaaagacttgctaaagaaacagaggacatcgctaaagttacagcacgtcctaaaatggatggccgtagcatgttcttaatgttagaaccgctaaaggaccaaaaataaaaaatctgtttctgatttattaggaggaaatatcatgccaaaatttaagacacaccgtgcttcagcaaaacgttttaaacgtacaggtaatggcggcctaaaacgcagccacgcctacacaagtcaccgtttccacggcaagactaagaaacaacgtcgtcaattaagaaaatctggaatggtttcaaatagcgatatgagacgtatccgtcaaatgttatcaggccttaaataagccatagcattttcggattcaagcaaaaattagatcagtacagcaacgctttgacgttgtttgttattcaaggaggaaattcttatgccacgtgttaaaggtggaacagtgacgcgcaaacgtcgtaaaaagattttaaaattagccaagggttatcgcggcgctaaacatttattattcaaatcagcaaatactcaagtaatggtttcataccgttatgcattccgtgatcgtcgtcaacgtaaacgtgacttccgtaagttatggattgctcgtatcaatgctgctgctcgtatgaacaacatctcatacagccaattaatgcacggtttaagagtcgctgaaatcgacatgaaccgtaagatgttagctgacttagctgttaacgatgctgctgcatttacatcagttgttgaagctgctaaagctgcattaaacaaataattaaagatcaaaaaaagagtctgggacaaaacttcgttttgttctagactctttcttttatcattataaaattagtggctaataacaatcttacctggggcatgatgactctcaaggagcttgtgaccttcaataatgccttccaaagtaaatgggagcgtcttgaagacggtattgtgtagtaaaccttgatcgatcaattcatttaaatcttgtaaggcggttaaatctgcataatccttacgcggatagacagattggtaattgatgtcagcgcgttgttgatcgtctgttggtaagatggtcgttgaagtgaatgtgccacctggtgcaactaagttattgaggcgttcagttgattctggatcgcgacttaagttgataccgattttagcggtctgcgcaagtcgttcgaagtcagatggctgatcataagcaattacttcttggacaccgaatgagcgcagatagtctaggttagcactattggcaattgcaatcacgtttaaatgagctgctaagcttaattgaacgagtaaactaccaacggcaccactggcacccataatagcgattgtatcgccgtgtttaaagtttgtgaagtgcatcagcgtattgtaagcagtgatgccggcactgggtaaaccggctgcttcagcgatactcatgctggctggcttacggagaatcttcgcagtactagccgttacgtattcgctataagcacccattgatcggtgattgatgacgatttcgccaacgcggtaatcatcgacgtcagcaccaagttcaacgatttcaccaaccacatctgtaccaggaaagattgggaagggtaatgggcgcactgaatcttgtgaaccattccgtagtgcaacatcgtatggattcaatccagcagcgagcactttaatgaggacttggttgtcctttggagttggttgaggctgatcgaaacgttcgaaaacgtcagggccgccaaagtgattaaaaccgaatttttccataacaaacacatcctctcaatttctttaaacgtaccagagttggggctaaaagtcgattagtttgacttatggatttaaatggattaggaattagttggaaattatggaaattaaccgcgtaaaggtgcaatttggtgtcaaataccctataattaatcagtgactagattaaaaagaagtgcgtcagtaggcggttatatttcgaggactagcctagtctggcgaatgaccaacttgttggtcgtttgacggacgtcgctagccgcaaaaatatgcctactgaggcacgttagaaaagaagtgcgttcaaacctggtatactccgagcactagcctaacaaggcgaatgattgctgcaagcaatcgtttgacttgtgtcgctagacacaggaatatggtttgaaaagcacgttaaagaaaagaagtgcgtcatccacggttagcttccgagcatttgcctaacttagcgaattggcgctgcaagcgccgatttgataagtgtagcaaagcgcaagaagctgttgatgaaagcacattaaagtcgaggggacagtacatgctaaagaatttcaagccaacttggatggtcaatgccatctacgacttaacaccagaacaacttaaggcaaaagggattaaggccgttttaacggatttagataatacgttaattgcgtggaataaccccgatggcacaccacagttaaaagcttggttagcacagatgcaagctgccgaaatcaccgtgatggttgtttcaaataacaaccatgatcgcgtgcaacgcgcgctcagtgaattgcaattaccattcattgctcgggcgaacaagccattggcaactgggattaccaaagcgaagaagcagcttggcctttcgcgacatgaagtggtgatggtcggcgatcaattgattaccgatatgcatgccggtaatgtggctggcgtccggacgatattggtcaaacccattattgacagtgatgcctggaatacatcgattaatcgattctttgaaaaatatattatgcaacaactactaaaaaaacacgcagatttaacttggcgggaggatttaaatgactgaaacacaacaaactgaggaagaactattttgtattggctgtggcgctcgcatccaaacaacggacaaagaagcactcggctatacgcctaattcagcgcttaaaaaaggcttggaaacgggtcaattgtattgccaacgttgttttagattacgacactacaacgaaatcagtgatatcaaattaaatgatgatgatttcttagccttattgaaccaaattggcgacagtgacgcgttgatcgtgaacgtcgtcgatatcttcgattttaacgggagtttaattccagggttacatcgttttatcggcgataaccccgtgattttagtggggaataaggttgatatcttaccatctgctcttaacccaaataaagtgatcaattggattcaaaaagaagcgaaagaacatggcttacatccggttgaaacgatgttggtcagtgctaaaaaagggaattcagttgatgaattattggccgtgattgaacgcgaacgtaaaggccgcgatgtctatgttgttggggtgacgaacgttggtaaatcaacgttgattaaccgcattatcaagcaaactgggattttagatagcgacgtgattacgacgtcacaattcccaggaacgactttagatcgcatcgatattccattgtatgaagatgatcatgcattgattgatacaccagggattatgcatgcccaacaaatggcgcattatttacatgataaagacttacggttgattgcgccgcaaaagcggattaaaccaaaagtataccaattaaatgaacaacaaacattgttcttgggtgggttagctcgttttgatttcattcaaggtgcacggcatggctttgtcggttattttgacaatgaactttacattcaccggactaaacttgaaaatgcagatcaattctacgctaagcaattaggggacatgctacagccaccacatccagaagatttagctgattttccagaactccaacggtatgaattctcaacaaagcaaaagagtgatttagtgtttgctgggttaggctggattacgttaccagaaaatgtcgtggttgcgggatatgcgcctaaaggtgtctcagtcatgattcggaaagcattaatttaattagggaaggaagtatcgcacgtgttaacaggcaaacaaaaacattacttacgcggtttagcgcaaaccactaaaccactttttcaactaggcaaaaacggcttaagccaaacttatttcgaacaaattgaagaggccatcgaaaaacgagaactcgttaagattaacttgttacaaacaacagaagtgaccgttgatgaattagccaacttcttaaaacaacatgacagtcgcatcgaaattgcgcaaaaaattggacgcacattggtgatttataaagcttcacggaaagaaaaataccaaaagatttcaacgattgttactaagctcggacgctaataaggcggtgatcagatgcaaagtgcaacgctaaagcagacaaatcatgtgactgaaccggacgtgttggttgtagaagatggccatcgcttgcaagtcggcattatggggggcacatttaacccgccacacatcggtcatttagtgatggcagaacaagttcgtagccaactcggtctcgataaaattttgtttatgccagatgccaatccaccgcacgttgatgagaaaaaaacattaccagcaaaacaccgtgttgcaatggtagaacgtgccatcgctgataattcgcattttgaactcgatttaacggagattgaacgtggcggtgtcagttacacctacgatacgatcgtggcattaaaacaacaacaccctgaaatcgattattatttcatcattggcggtgatatggtcgactacttgcctacttggtatcgaattgatgatttagtgcagttagtccaatttgttggtgttaaacgaacagggtatgctcaacaaacgccgtatccagtcttatgggtggacgcaccggtaattgatgtcagttcaacgcaaattcgcaataagattcaacaaggctgttcagtgcggtacttgttaccggacccagtctttgaatacattcaaaaagagggcctctatcatgagtgattttgtttatcaagaaaacatcgtgccgtatacacgggctgagttagtggctaaagttgccgctaacttatctgaaagccgatttgaacattgtttgcgtgtggaagccaccgcgattcaattagcacaaaaaaatggcgcagatgttgaacgcgcggcaattgctggtttagtgcatgactatactaagcaattaccagatgaaacgttcattgaagtgattaaaacgcaaggctttgatccagaactactcaattacggtaatgccatctggcacggtgttgttggtgcttatttcattgaacgtgatttagaaatccatgatgaaacgattttaaatgctgtgcgtcgtcatacgattggtgcgccagaaatgaccttgattgatcagattttatttgtggcggattttgtcgaacctgggcgcaattttccgggcgcagaagctgctcgtgagacagcaatggctgatttagcagccggcgtgcggtatgaaatcttaaatacattgacctttttaattcagggcaagaagcagatttatccgaaaacaatcgacacatacaatgcttgggtaccgactcaagccaaataaaggagaactttagtgaaaagtttagatattttaaaaattgctgtgcaagcagctgatagcaaacgagcagaagacatcgtcgcaatgaacatggaaggcatcagtttattagctgattacttcgtgatgttaactgggacgtcagaacgtcaattaggcgcaattattgacgccattgaagacgcagaagaagaaaatggcgttttcgtaaaacacatcgaaggtaaaaagggttcacgttggatcttgatggactttggcgatatcgttgtcaatgccttcatgccagaagaacgtgccttatacaaccttgaaaaactttgggatcaagcaccacttgttgatgtttccgaatggttggatgaagaatgatttaccaaagctttgcaaccgtctatgaccgtttgatggaccattcattatatggtcaatggcgggattacacgttgcagacgttacaaaataaacatcgagtcctagaactagcttgtggggctggtgatttagccatcttgctaaaacaagcagggctagaggttgtcggcttagatttatcggccgagatgttgagtatcgcttctgaaaaggcttctgaagccgaggtcgagttacctttattacaaggcgacatgcttgacttaggcgaaattgggacgtttgaagcggtcacttgttttgacgactcgatctgttacatgccagatttagcgcatgtccaacaagtttttgaacaagtttatcgaactttagagccaggtggtcaatttctatttgatgcccattcactttatcaaatggatgagcttttcccaggttttatgtataacgataagacggcagaaacggccttcatgtggacgagttacgcaggtgaagtaccacattcagttgaacatgatctcagcttttttatctgggatgacgagattgacggttatcaagaacttaatgaattacaccatgaacgaacttatccggtggtagattatgttgcagcattagaagctgctgggttcaagaatgtatcagtcagtgctgattttggccaagaagccgttcaagaagatagtgtgcgttggttctttagcgcagtgaaataggcggaggacgcatgagaattacggggattattgcggaatataatccgctacataatggacatcggtatcaattgcaacaggcgcgggcagcttcgcacgcagatttagtgattgtctgcatgagcggtaactatgtgcaaagaggtgaacccgcgattttggacaaatggacgcgcgcacaacttgctttgagcaatggtgctgatatggtcgttgaattgccgtttgccagtgctgtccaacctgcagaccgttttgctgatggggccgtcaagttattggcggcgcttggttgtcagaccttagcgtttggcagtgaatatccaacgtttgactatcagcaagtcgggcaacagattttagctttaaaggccaagtcacagacgtttattgattatcaaaaaacttatgcgacgcagctcaatgagttttatcaagcagaattaaatttaaatttagatcaacccaatcacctcttaggggtcagttatgcggttgccaacgcgcaacttgaagtgccaatgcagttgcttgcgattaagcgtgagcaggcacaacacggcgatcaaacgattggcgcgggacaatttgctagtgccagtgctatccgacaggcggcaacaaagggtgatgactgggcacagttagccccagtgatgccgcattcgactttaacagcgctccagactcaatcgcatctggattgggaccaactatggccgctattgaaataccgaattgaaagtacaccccttgcccaacttcggcagatttatcagatgtcagagggcttggagtaccgtttcaaaaaggtgattcattcagtcaatcggtatgccgagttgttacaggcacttaaaacaaagcgatatacgtatgcacgcttgcaacgggtttgtttatacgtcctgttgaatattcaacaaacggatattgaacaatcattagcgcagcggcccatccatttgcttggctttaaccaagtcggccaggcgcatttgcacacgttgaaaaaaacgctcgatcaaccacttatcagtaaggtctcagctaaattgggtgccgaagagggcccactggggttagaggtgcgagttgatcgattacaagaacagtttggctggcaatcacagaattttgcccgccaaccgatttttaaccaaagaaaggatgacgagcattgttaaaatggacagtccaatcattattaaaacatcgtgatcatccattgatgtttaaagaaacattgatgttaaaagaaagtttacaaaaaagagaagctgatgtcctagatgctacaccatttgtagtagacggtgtattaacggttgaccagcgcgctgtaattgcacgcgtacatgtggtcgggacattaacagtgccttcaacgcggagtttagatccagtagccttgccaatggattttgaattcactgaaatctacgttgatccagaagacgagcagttgggacgatttacggacgaagatattttgttcccaatcgaaggcgaagccctagagctacaggtagctgttgaagatcacattctcttgcacattccaagtcacatcctaacaccagaagaagaacaagatgatgtgatgccagccggacagtcgtggtcagtcatttctgaagaagcctatgctaagcaacaggctgaagaagaaacggcacccaatcctgaatttgctaagcttaaacaattattagaagaacaaaacaatgacgccgactaagtttggcgtttttttatacccaatttgttaaatggaccggaccaaatcagttaaaatgcttttatttaaagcgtaattctgctaacataaacacagtagacgcgttgtcgttttgatagtcaacaacgcttaaatttagaaatcatttagggggccttttacatgagtcaaccacaaatcggtgtcatcgggatggcagttatgggcaagaacttagcattaaacattgaaagtcgcggttacaccgttgcgatttataaccgaacaggtgctaagacagaagcagtgatgcaagatcacagcgaaaagaaattggtaccaagctatacaattgaagaatttgttcaatcattagaaaaaccacggcgaatcatcttaatggttaaagccggcgctggtacagatgctgtcatcaacgaattgttacctttattagataaaggtgatattttaatcgatggcgggaacaccttctttggcgatacaattcgtcggaatgctgaactagataagtcaggcattaactttatcggaatgggtgtttctggtggtgaattaggcgcattagaaggcccttcaatgatgccaggcggtcaaaaagaagcttatgaattagttgcaccaatcttagaacaaatgtcagcaaaggctgaagatggccaaccatgtgtcacatacatcgggccaaacggtgctggtcactatgttaagatggtccacaacgggattgaatatggtgatatggaactcatctcagaaagttataatttattgagaaacgttgttggtttatctgttgaagaaatcgctgatgtcttcaaagaatggaaccacggcgaattagacagttatttaatggaaatcacagcggacatcttaacgcgaaaagatgatttagaaacggataaaccaattgtcgacgtcatcttagatgctgctggtaacaaaggaactggtaagtggagttcacaaagcgcccttgaattgggtgtgccacaatcattgattacagaatctgtttatgcacgttatatttcagcaatgaaagacgaacgggtggctgcaagcaagattttaccagccccaaccgttgctaaattaacagaagataaaaaagaattaatcgaaaagattcgccaagcattgtacttcagcaagatcatgagctatgcgcaaggctttgaacaaatgcgggttgcttcagatcaatatgactggtcattaaactatggcgaaatcgctaagatctggcgtgaaggctgtatcattcgggcccgtttcttacaaaagattacggatgcctttgataaaaaagctgatttaaacaacttattgttggatgattacttcttagatattacaaagaattatcaaggcgctgttcgtgacgtagctgcaatggccatccaacaaggtgtgccagcacctggtttctcagctgctatcacatattttgattcatatcgttcagaagtattaccagcaaacttaatccaagcacaacgcgactactttggtgcgcacacataccaaagaacagaccgcgaaggcacattccattatacttggtataaagaacaatagagtgcgcaagtagacggggatgcgctgaggattagtggaatatcgtaaatgagcggtgaaaccgatcgtttgcggtatgtaactaaccggaagcggatgtctactggagcacgttttagtacaagagtgctgactattgcatttagtcattgagcattaataaaaaattgccattaatcccggttttaggattaatggcaattttagattaagcggaaatggctgcgacgggatgcgcgttttaaaatagagtgatgagtcgaacgtttttggctttgaggattaacagaaaaatgatgcttatggcggttcttagccataagcatcattttactgttaaccggaaaagacagttcgaggaagcacgtttctctaaacacccgagccgattattaaggcgcaggtgttttttcgattattactaaatcgccatcagatgagagtcagattagttagttatttaattggaactatgctagaatggaaaggtaagccgattttggcgcttgaggtttcttagagaattcttatcattgattagaatttagagagtccattaaaaattcttttttggggagtgactaaatgagtcgcatattgattattgaagatgagaaaaatttagctcgatttgtggaacttgaattaaagcatgagggttatgagacagaggtccatttcaatgggcgtactggtttagaagctgccttgaatgaagaatgggacgcgattttattagacttgatgttacctgaattaaacgggttagaagtctgccgtcgggtccgccaagttaagaatacgccaatcattatgatgacggctcgtgattcagtgattgaccgtgtttctgggttagatcatggcgcagacgattatatcgttaagccttttgccattgaagaattattagcgcgtttacgggcattgctacggcgaattgatatcgaaggcgaacataacgctgctaaacaaacgacggttacttaccgtgatttaacggttgaaaaagaaaaccgagttgttcggcgtggtgatgatgtgattgaactaacgaaacgtgaatatgaattattattaacattgatggaaaacgtcaacgttgttttggcacgcgatgtcttactcagcaaagtttggggttacgattcggatgttgaaaccaatgttgtcgatgtttatatccgttacttacgaaataaaattgatcgttctggcgaacaaagttacattcaaacggttcgtggaatgggttatgtgatgcgctcgtgatgcaggacgaaacggtagcatcaacaacaaataagggtcgtaaaatatcgttaaaggtgaaatgggcagctgcggttgggttggccatttttatcacctttgcgattttttcaattgtgatctttagtagtatctctaatatcttgctacacagagaagtcgataatgtgcacgatacggtgaccgtcgtacaagcgagattgtccagcaatgggccacatcttacagaaggctttgtcaccaatcaattggatccgaaccgtcacagccctaaagccatctatcaagatgcggttttaacgcggttagcacaacaggatgttacagttaagatttatgatgcaaacaagaagggtttgtttgcatcgcgcggggcgattggtccgtttccaaaaggcgatacggatacattaaagcgcaaagctatttttggtaagatgcggctgattggcattagtccgattaagacaagtcaaaaccgtgtaattggttatgtagaggtggtcaataacgtccgtgattataaccacgctatgactgaattaagaattgtgttagttgtggttgtcttttttgctatgttatttagtgcattgattggttatttattagccaaccaattcttgcgaccaatcgaagttatgaaaaaaacgatagaagccattaattcagagcctaattcagatgtccgaattcctgagactgggcatagtcaagatgaattatctgatctggtcagtgcgtttaatggtatgttgaatcgaattcagcattatttcgaacagcaagaccagttcgtcagtgatgtttcgcatgagttgcggacaccagttgcgattattgaagggcatctacaactgctcaatcgatgggggaaagatgatccagaggtactggaagaatctttagcggcttcgttacaagaaatcttgcggatgaaaaatttaattcaagaaatgcttgatttaacacgggcagataaagtcgtgactgaaggaacgactgaagtgaccgatgtcggggaagttgttcttcagaattaccataacttcgagatgttatatccagaatttaattttatgctcgacaatgatttgcaccaaccagcgctagtgcatgttaatcgaaatcacttagaacaaattatgattattctgttggataatgcgattaaatattcaacgatacgtaaagaagttcatattgccgtcgctagtgatgagcggtatgcgcaagtggccgtgcaagactttggtgaaggtatttcggaagaagataagaagaaagtctttcaccggttctatcgcgttgacaaagcacggagtcgggaaaaaggtggcaatggattgggattagcaattgcccaacaactcgttgaaggctatgacgggaatgtgtcgctagaaagtagcgttggctacggttctgtttttagagttgagttaccactgattcgtgaagtagaaccaaaatcagaagaaccagttaatacggattaaaaaagcggtgcgcttcaatcatctaattgattgaggcgcaccgcttttttttgttggttaagcttgtggcttatgccgttgcttacctgagttgcgtttgccagctactttaggtgtagcgacagttgggttgcttgtttctgttggtgtttctgtgacgtcggcagctggtttgactgctgctttttgagtgaacatttcttttgtgacaaccgtgacgattggtttttccttaatttcttgatcgatccgttttttaacacgaggcatgatgatgaatgtcgtgattaattgttgaatcaccatgataatcccaccggctaagaaataaagtgctaaaccggctggtgcaaataacgaaatgaagaatgtaatcgcaggactcattaggacggttgtttgcatttgtttcttttgttcagcaggcatcccgactaatgaaagtgcactttgaccgacatataagagggtcgcaatcacagtaatgataatgtttgggctcccaagaccgatcccaaagaagtggctacttgaaatttcaggtgagtattggatggcttgatacaaaccagagaagattggtaattgaattaataaggttaaacaaccaagacttggcatcatgcttgaatcattttccttataaaccttcatcatcaactggctaagttcagccttttcttcaggggttgttgccgctttttgttgttcttggataatatctaattgcggtttcaagcgacgggtcttttcttgttgggccgtcatcttattcgattggttcaacattaatgggagtaaaatcatccgcacaacgaatgtgatgatgataattgcccagccgtaaccattgatgccaccgaaaacatcagcaatgcgttccataatatgttggagcggcacggcgatgtatttataggatgaaccatagattaagccggttgggactttgggatggctgctcattttttgtggaacacagccagcgagaaagaatgtaacggtcattgtaagcatcgcgagtgtcgcgaagcgtttagaatttttcataaatttagccctttcaagataagtttcaacaagtgtaactatacttgaaggggctaggtttttcaactgacaaccgaaaatttatgacacgctgacacattttcgagcggtgtttgaatgacacggtcgacgcgcccactaggggtgggagaagctttgacagcaccgataaatttttcgagtgcgtctgctgggcccatcgcaataattttaacggagccgtcttcacgattggcaacggtacctgtgatatggagtttatcggcgaccaatttggtcatccagcgaaatccgacgccttgcacgcggccatagacttcaagttgaattgcattttgcattgtcatcacctcctcttcattgtaagctgttcaacccgatttggcgattaaaaagcgacccttgatagaatttacccactaagtcgcgtataatagaaagtactaaatagactggagcacaacatggaatacattcaatcgaatcaaaacactaaaattaaggcggctaagaaattaaccgttaagaaaaaccaacgtaaagaaaatacgtatctactagagggctggcatttagtccaagaagcaatccaaaataaggccgtcatccgccaagttttcgccactgaaaaatatgtggacgaacgcgcattgcgcggtctttacgatgaaacttttgaaattgcaccagaagtggcgcaacacttgagtgaaactaaagcaccccaaggcatttttgccgttgttgaaatgtctgaaacaccggtaccagaaaaattaacgggtcgttacttattattagatgctgttcaagatcctggtaatatcggcacaatgattcggacagccgacgcagcagactttgccggcgttgttttaggcaatggcagtgttgacttgtataatccaaaactcttgcggtcaatgcaaggcagtcacttccatttaccaatttatcaaggtaacttgatggactggatgaagaaattcaattcgcaagacgtcccagtttatggaacggaattaaatccagaggccatcagttatcaagatgtgcctaaagcaaatgacatggccttgattctaggtaatgaagggaacggcgtgaatgaaaacgtcttagcagccacaacgcaaaatatttacatcccaattccagggaatgctgaatcattaaacgtggcagtcgcagctgggattttaatgttcaagttgattgaagcttaattcttaattttttctaacaaacgtaactttttaaggcgtttaacttcttttttgaacgaaaagctgttatccttgtggcagaatttgaatttaaaaaatgtcaggagtctttgaatgaattcaacagcaaaatggtacgatgacgcggattacatggctctaattgccgatttattagctaaagatgaagtccaaaaattagcgaactatacgcaacatcatcattcagatcgtttggaacattcgctaagcgtctcttatcgcagttatgaacttgccaagaagtggcatcttgatacgcgagcaattgcacgcgcgggcttattacatgatttattctattatgactggcgtgatacgaagttcgatttaggcacacatgcttatatccatccgcgcattgcgcttcggaatgccgaaaaattaacagaactctcacctaaagaaaaagacatcatcgttaaacacatgtggggcgcaactgttagtcgtccgaaatataaggaaagttacattgtatcgatagtcgatgattattgtgctgtgacggaattttgtacaccaatgtggacgaaatttaaacaaaaagttctccgccaaacaccggcaattaacaagtaaagatgcttcaagctgataggttgctttttgcagcctttttcagtacacttcttattaataagtgtgaggtgaaaataatggtgattgtaaaagaaaacgcaaatgctgactgtcaagaggccttccaactgtgtcctaaatttgaaaagactttttcaattctaggtaagaagtggaacggcctgattatcgatgtcctattagaaaacggggcacaacggtttaaaaacttagtgcacagtgtgcctaagtgcagtgatcgcgtattggttgaacgattgaaggaactagaacaagaaggcattgttgcgcggattaccagtgatgattctgcgttgattgaatatcgattgaccactaaaggtgaagaattagcgccagtaatggctgctattcacgattggtcaaacgactggtatgcgacagaagcctagttgctaattgcggttatttacgttaaaatacaattattaaacaaagacgaaaaagagtaacctaatcattagttttcagggagaataatcagttgactgcaagttattcaactaagtttaggtgaagttcactttctgagttgaccattggtccggtattgcccgttagcgcaaacttgagtgtatgactggaatggtcgtaaactagggtggtaccgcgaagcttcgtccctttttgagggacgggctttttttgttgaaaaaaataaggaggaattgcaatgtcattgaaggaacaattagaaaacttacagcaaaagagtctgcaagaaattcaaagagttgttgatttagaggcgttaaatcaaattcgagtggaagtgctcggtaaaaaaggaccgattacagaagttttacgcggcatgcgtgatttaagtaatgaagaacgacctaaggtgggggcatttgctaatgaaatcaagagtgatttggcagaagcaatcgaaacccggaaggcagaattagaagccaagaaggcagcagcccaactggctcacgaaacattagatgttacattacctggccaaccggtcaaaaaagggaccccgcatgtcttaactcaagtgattgatgatttagaagatttatttatcggaatgggttatcaagtcgttgctggctatgaagtggaagatgaaaaacataactttgaaatgttaaacatgccagctaatcatccagcccgtgatatgcaagatacgttctatattactaatgatttattgatgcgcacgcacatgtcacccaatgaagcacgtgacttggaaaaccatgactttgctaatggtcccattaagatgattagtcccggccgtgtttaccgccgtgatacagatgatgcaacgcattcgcatcaattctatcaaatggaaggccaagtgattgataaaaacattacaatggcagacttaaagggaaccttagaatacacgattcaccatatttttggtgaagaccgtgatttacgtttccggccaagttactttccattcacggaaccatctgttgaagtggatatttcttgtttccgttgtgatggtaaaggctgtaatgtctgcaagcaaactggctggattgaagttttaggggctgggatgacacatccgaacgtcttaaaagccggcggtgtcgactcagatgtctatggtggattcgcctttgggctcggggtcgatcgctttgcaatgttgaaatatggtgtggatgatatccggaacttctacttaaatgacgttcgattcttaaatcaattcacacaggagggctagaccatgaaagtttcttacaactggttaaaagattatttagatttaacaactgccccagaggcattggctgaaaaaattacccgaacagggattgaagtggctgatgtcgcgcaaaagagcgcgggcttgaaaaaaattgtggtgggacatattttaagttgtgaaccccatccggattctgatcacttgaatgtttgccaagtggatgttggtgaagatgaacccttccaaattgtttgtggtgcacccaatgtcgctgctggccaatatgtagtcgttgcattacctaattctcggattgctgacaacgttaagattaaaaaaggcaagatgcgcggcgtggtttcaatggggatgatttgtggcttacaagaaattggctttgccgatagcgttgtgcctaaggaatatgttgatggcatctttgtcttcccagaagcaattgaacctgggacagaagtttatgaagctcttgggatgactgattacattatcgatcttgacctcaccgctaaccgagccgatacgcttggcatccacggtgtggcccatgaagtggccgccattgaatcattgacacctcattttgaagatatcgtagtgactgaaagcaacgttcaaacagctgatcaattgactgctcaagttgctgatgaacaattagcaccaagttatcacttgcgtatgttgcaaaacgtgaccgtccaaccaagtccaatgtggctacagacgcgtttatggaatgctggcattcgccccattaataaccttgttgatgtgacgaactacatgatgttaacgtatgggcaacctttacacgcgtttgatgcggatgctctaacgggtgatcacaaacaaatcgaagttcgtttagccaagatgggcgaaaaattaacgacccttgatgaaggcaaacatgacttaacaaatgaagatatcgtcattacagatggtcatcgaccaattgcgctagcaggggtcatgggtggtttgaactcacaaattactgctgatacgaaaaatgtgattatcgaagccgcagtttttgcaccaactgcagttcgtaaaacggctcaacgccataacttgcgttcagatgcgtcatcacggtttgaaaaaggcgtgaatgttgctgatgttcaaacagccttagatgctgctgctatgatgatggcagaccttggtaatgggcaagtgactgctggtacggttagcccaactaacttagtgccaactgacaaagtgattgaaatcgaagctgaccggattaatcgcgtcttaggcacagagattgcaacgcaaacaattgttgaattattagaacgatttggttttagtgtggtcaatactgataatcatttaacagtaacgattccaccacggcgttgggatattgaaatccaagcggatatcattgaagaagtcgctcgtttatacggttacgataacttaccaagcacattgccaactggcgatatgacaaccggggcattaacgactgaacaaaaggcactccgtaaaacccggcatacacttgaaggtgctggtttaacgcaagcaattagttatgcattaacgacccctgaaaaagcgcgtcaatttacgcttgttgattcggcgctgacagcacttgattggccaatgacgcaagatcatgcgcacttacgcatgaacttgattactggtttattggacgatgctgcttacaatgtggcacgtaaacaaactgatcttgcactatacgaacaaggacgggtatttttaaaacaagcagacgaccaagttcggccaacagaaattgaatatgtggctggcttaatgagtggcaatcgccaaatgaagacttggcaagctgccgcagcaccagttgatttctacacaatcaaaggtgtggttgaaatgttgatggcaagttacaacttagcggatgcaatcagttatcaaccaacacaagcttatccagaaatgcatcctggccgaacggcagccatttacgttggtgaacaactggttggatttgttggtcaaattcatccagcagttgcgaaagctaatcatttaaaagaaacttatgttttccaattagatttagcacaaatcctagccttgccaacccaaacagtgattgctaaaccagcacctaaattccctgaagtaacgcgggatattgcaattcaggtgtctgatcaagtttcaaatgccgcaattgttgaagccatcaaagcaaagggtggcgcccacttagtttcagttgaacttttcgatgtttacgcagggagtcatattgaggctggtgagaagtcaatggcttacaccttaacgtacctcaatgaggcagctactttaacagaagaagaagttaacgctgcttttgaaaaagtagtcgctgaattagttgctacttttgatgccaaaatccgttaatctcgaatctttaatgcaatttttgaataatttggtataatgttttaaggattgtatttaaaagagcaattaggaggtcatcctttgaagaaagttgatcaaaaggagccagtaaatcaagaaaaagcggcacaatcattgtacgaagaacgccgtgcagaaaaaaaagcagcaaataaaattgtctattggattatcggtattctattagcgcttgttgtcattattggattcatgggatatcgctacgtacaagcatctcttaaaccatacgacaccaaagcaaaacaagaaattaccgtgcgcattcccaacggctcaacgaataaacaaatcgctgctattttgcaggataaaaaattaattcgaagcgcgccagtctttaattattatgtgaagactcataatttctcggatttccaagccggttatcatgtgttgaaacaatcaatggggttagataagatcatctctaacttacaaaaagaaggcacaccaacccgtcctcgcgatgtgaagggcaaattgttagttaaagaaggggtcactttagaagaaattgcggccgaagttggtaaacaaacaaaattctctaaagcagccttcatcaaacaagcgaatgataagcaattcttagcaagtttagagaagaaataccctgcattattgtcatcaacaatggctcaaaaggatgtccgctatcacttagaagggtaccttttcccagctacttacgaagtttataaagatagtacattaaaagaaattatcaccgaaatggtttcaacgatggatcaaaagatgcaaccttattatgcaaccattaaggataagaagttaaccgttcaacaaacgttaacgctagcttcattggttgaacgtgaaggggtcacagccgtcgatcgccaaaagattgccggtgtcttctttaaccgtttagacatcgatatgccaattcaatctgatatttcagtaatgtatgcattaaatacccacaagacacacctttataacaaagatactaaagtcgattcaccatataacttatatatcaataaaggttatggcccaggaccgtttaactcacctagtttacagtctgtcacagccgtcttgaatccagctgatcgtgatcaaaattatctctactttgttgctaacttgaagacaggtaaagtatattactcaagaaccttcgaacaacataacgatacaacagattcgattgaagattaggttcatttaggattatcgaagtcgaccgccattggaggtcgacttctgtttgcccaaaaagaagttgagaataaaaggagcgtcccatgtccagtcaaaaaaaagcacccatcattatcggcgttacaggcgggtccggtagcgggaaaacaaccgttagccaggctatcgcccaaaaatttgcgaatcactcagtgatgttattaccacaagatgcgtattacaaacggcaagatgttccgtttgaacaacgccaacaaacgaattatgatcatccagatgcttttgacaacgatttattaatcgaacaagcatcaatgttaaaaaatcatcaagccattgaacaaccggtctatgattataaaattcataatcggacggaggaaattcaacgggttgaaccgcaagatgttattatcttggaggggattcttgtattggctgatgcccggttacgggatttgatggatattaaggtttatgtggatactgatgatgatattcggttattaagacggatgcatcgcgatatggaaagccgtggtcgaacgtttgatgatgtggttggccaatatcttaagacggtaaaacccatgttccatgaattcattgaaccaaccaagcgttacgctgatttaattgtcccagaaggtggcaataatcgcgtggccattgatttacttgtaacaaagattcaatcaatcctaaatgccgattaaagattgagatttgacaaggacgtacacagtaattaagatagtcagtattattaattaaaataaagaggtggataaaatggtacaaaaaacttatccaatgactgcagaaggcaaagaaaagttagccgaagaactagaaacactcaaaatggtaaaacgaccagaagtcattgaccggattaaaattgcacggagctttggtgatttatcagaaaactctgaatatgaatcagctaaagatgaacaaagctcattggaaacacgcatcgcagaagttgagaatatgttacgctttgcagaagtaatcgatgttgatagcatcgcagctgatgaaattgctgttggtaaaacagttagctttacagacgacgaagatggtgaagaagaaacttaccaaatcgttggtgctgcagaatcagacccattcagtggtaaaatttcaaatgattcaccaattgcccaagcattacttggcaaacacgttggtgataaagtagctgtgcaaacaccaggcggcgacatgcacgtcacaattacagaagttaaataaagtgcgtttcgaacgggttagtctttgaggattaacgtaaaaacgggtgttatggtcgaattttgaccatgacgcccgttttgtagttaaccggaaaaggttgttcgaaaaagcacgtttaagaatagagtgcttttgggtgcggttagcaactgagcattaatacaaaattggcagtcatccagattttaggatgactgccaattttagattaagcagaagttgttgcagccaaaaagcacgtttcaaaaaagccacggaaatcaatcccgtggcttttttattttgccgttaattcgttaatcagccttgagacggattggtgtttatctggtttgcttgtataataatattaatcagttgaaaggggaccgtaaatatgccgtttatctggcgcgtttttttaataatagaagcgattatcttcgggacgttcatttggcagatgattacgatacccgcaaatttagtgttcatcattgcaggtattttactcttagtctgggccaacaaacgtcgtagtaaaggtaaaatcggtgtctggacgactttgttaacgatggtcggttgcgtagctgttacggtaccactgttaattaatttctcgttatggttaatgattattgttgcggtcgtctttttagccttaaatcatagccgaatgggacagtttagcagccgcaatatgaatcagttgtttgataatgccccttggcgcaagaaaaaatttattcccgttaatacgacggaacccaccgcgaaaaagacaacagtcaagcggcatagttggtttggtcatcagacaattggcaataacatttttgaatgggatgatattaacttcgcggtcgctgccggtgatacaattatcgatttagggagcaccattttacccaagaatgacaaccatattgtcatccgtaaggggtttggaaagacacggattttagtgcctgtcgggaccggtgtctatcttgatcactctgcaatgttagggagtgtgacaatcgacaatcagcactataatttgaaaaatgagtcgattcagttgtatagtacaaactatgatgaagaaagtcgccaccttaaaatcattaccaacgtaatgattggtgatcttgaggtgatcttagtatgagcaagttaacgcggagctttatatggatcagcacgagtttgttgacgcttctgttttcagtggcgttattttttgcgtatttctacagtacgcatcaggaacaatggctgattagtttggccacgaagcaattattctatgtaccactgattgtttatattgtggtggccgcaatggcagtaggctttttagttaccgcaatcgtctatcttgtcgtacgtaagcaattatcccatactgaaagccagttacaatttttactttctggacagtatgaatcgcctgtttttcagattagacagagcgaaaccaatgactacgcgatgtcaatcgagcaaacagttgaacaattacgccaaaaaatgatacgcttacaacaagagattcaaagttatagtgatcggccgaccgtgattgctggtgaaaccaaggaagaaattctagcgcaagaacggcatcgtttagcacgcgagttacatgattcagtgagtcagcaactatttgcggcgacgatgatgttgtcggcactcagtgaagttgcgcaaaaacaagctgataacgcgcagatgttgcagtccttaacgacagttgaacgggtgttaaatgaggctcaatcagaaatgcgggccttactcttgcatctacgaccagttaatttggaaggcaagagtttacgcgatgggatcattcagttattgaacgaattgaagaccaaaattgcgattcagattacatgggacattgatagcataacgttaccaagtggcatcgaagataatttatttagaattgtccaagagttgctgtcaaacacactacggcatgcgaaggcccaagagattgaagtatacttgaaacaactcggtcagagtgttttactaaaggtaattgatgacgggaccgggtttgatacgaatgctgagcaaaaagccggcagttatgggttaaacaacattgtcgaacgggcccatagtgttggagggacggcaaaaattattagtttgcctaaccagggaacgagtgttgaaattcgagtgccactattaaaggagaccaattaagtgattaatgtattgatagtagacgaccatgaaatggtgcgattaggcatctcaacgtatttaggggttcaagacgatattcatgtcgtcgatcaagccgtcaatggtaaagaaggtgtcgaaaaggcgcttgcattacgtcctgatgcgattttaatggacttagtgatgcctgagatggatggcattgaggccaccaaaacgattttaaaggcgtggcctgaagccaaaatcattatcttaacgagttttatcgatgatgagaaagtttatccggcgattgaagccggtgcggccagttacatattaaaaacttctacagccgaggaaattgccaatacgattcgtaaaacggcgcaaggacaatcggttttagagccagaagtgacgaataagatgatgaatcgcttaacacatccggctgaacctaagctatatgaagacttaactaatcgcgaacgtgaagtcttaggcttgattgccaaaggccgtagtaatcaagagattgcggatgaattattcattacgttaaaaacggtcaagacgcacgtttcaaatattttggcgaagttacaagtggatgatcgcacccaagcggcaatttatgcgattaagaaccaactagtcgattaatcaggaggagttcaacatgcaaattcaggtgtcagatgcagcaagtcaatggtttcgcgacgaattagccttacaatcgggggatgcagtccgcttttttggcaaagtgtatggtcaaacggccgtgcatgatggcttttcattgggcatggaacgcgctactgttgagcagccaattggttcggttgttaaagatggtatcacctattttgcgagtcaatcggacgaatggttttttgccgattatgatttacaggttgattacgatccagagcttgaagaacctaagtatcaatttgaacgtcgttagacgataaaaagccccgccaaatcatttagcggggctttttattttgggttaaaaggcgaccagtacgcgcccagttttatgcgtcttttggctaagttctcgggctaaatcagaaaaggcgaccaagttaactgttggccaaatttccggtttaaacgtcgtggcgagtaattgccagagttctttacggtctttgcgcgggtaatagactgaatcaattccggctaaggtaatcccacgtagaataaacggcatcaccgttgtttctagggttgcaccagcggcattgccacaagttgctacgaatccgccggcacaaacttgcggtaagatgtgggctaaaacaggaccgccaagcgtatcaataaccccggtgaatgtctgatggctgagcgctttaagcggaccagcagttaggtcagctgtattaataacatgggtcgcaccaaggtgcaataaataatcggtttgttgcaagtcacgcgtagttgcggttagatttgtgaagccaagctgcgcgaggatggtaagtgcgaaacttccgactccgccagtggcacccgtaattaagagtggggtgtcatgatcggctgtaaaggcttggcgtaataatttgctgagcgcaattgcggtggtgaaaccggccgtcccaaactgcatcgtttcagcaagactaagattttcgggcaacttaaagagccattcactagggactttgacatattcagcgtagcccccagcgattgtaatgccagtttcataacccgtacataacacctgatcgcccgcttcaaagaacggattatccgattcgacaatttcgccagcaaaatcaacgccaggtgtcatggggtagtgacgtaagacgccacttttaggattcatagcgagccggtctttgtagttaatatcagaataggcgactttgactaacaccccgtctttagcgaggtctggcgttaacttagtttgataagtggcactgacagtggtatcggtttgttctaaaacgagtgcttgataggcgaccatatgattacaacctcatttctaaataattatttaactccattatacaacaatgttcgctttgaattggcattgcgtctcggaaacggtataattaataggatattagtcaactaataacgagtctgagagtgctaaagataaaggggacgaagaagaagatgcaacaaccaatggtggaatttaaaaatgtcattaaagaatacgacgatgtccaaattttaaagggcatcgacattgcgttggaaaaaggtaagttttataccttacttgggccgtctggctgtggtaagacaactattttaagaattatcgccggatttaccaatgcgtctgccggggatgttttatttgaagggcagaagatgaacgatttaccggccaataagcgccaagtcaatacggtttttcaagattatgccttgtttccccatctaaatgtctttgagaatgttgcatttgggttaaatctacgtaaagttaaaaaagcagcgattaaagaaaaagtgattgaagcccttaaattggtgcgccttgccggatatgagaatcgcgaaattagtgagttatcaggtgggcaacaacaacgagtagcgattgcgcgcgctttggccaatgaaccaaaagtcttgctactagatgaacctctatcagcactcgatatgaaattacgaaaagatatgcaatatgaactacgcgatttacaacaacgattagggattacgttcttatttgtaacgcatgatcaagaagaagccttagcgatgagtgatgaaatttttgttatgaacgaagggcgcgtgttgcaaagtgggacacctgtcgacatttatgacgaaccgatcaaccatttcgtagccgattttatcggggaaagtaacattctgccaggtaaaatggttgctgattatcaagttgaaatggtcggcaagcagttcgaatgtgccgatgccgggatgcgggtcaacgaagcagttgaagtggtgcttcgtcctgaagatctagacattgttgccgttgaccaaggccaattagtggtaacggttgatacgcagctatttcgtggtgactattatgaaattacggcctatgatgcggatcaaaaccggtggttgattcattcaactaacccagctaaagatggtcaacgagtcggcttattctttgaaccagaagacgtacacatcatgcgttttggggaatcagaagaagatttcgatgcacgacttgaaagttacgaagaggaggactaaggcaattgcgtaaaaaacaatggttatattacttaccatatgccctctggctaattttgttcgtcctcgcaccagtcgcattgattgtgtaccagtccttctttgatatcaatgggcatgcgacattggtcaactacacgacctatttccagtcaggcacttacttgaagatgacattaaattcgttatggtacgcctttttaattacgctgattacgctattaatcagttatccgacggcgtattggcttcatcaaacgaaacataaacaactttggctattattaattattttaccgacatggattaacttattactgaaagcttatgcgtttatcgggatttttagtcaagatggtgccattaatcattttttggggtggttcgggattgggccacaacagattttatttacgaatttcagtttcttagtggtggcgacctatattgaaattccgtttatgattttgccgatatttaatagtttagaagaattgaatccatcattggtcaatgcaagtcgtgatcttggcgcaagtaattggcaaacctttacgaaagtcatcttaccgttaacaatggctggggttaaagccgggatacaggccatctttattccatcgttatccttattcatgttgacgcgtctaatcgggggtaaccgcgtgattacgctggggactgcgattgaagaacacttcctcacaacaatgaactggggaatgggctcgaccatcggggtggtcttaatcgtcgccatgggcttaatcatgctggtaaccggggagcaaaaagcaaagaagaaggtgactaacaaatgaaaaaaatgaaatggcaaaacgtttggttagtgcttgtctctgtcttattgtacgcaccgattttctatttgattttctattcatttagcagtggggataatatgaatggcttcaaggcatttacctgggcaaattatcaggccttgtttgaagatactcggatgattgaaattgtgttacaaacgttattaatcgcgattctatcatctttatgtgcgacgattgtggggacgtttggggcgttagggatttattcaacgaagcaacggcgtgtgcgcaatatgattttatcgctgaacaatattttaatggtttcacccgatgtcattatcggggcaagttttttaattttcttcacgttcttaggttttggtttgggctttggttcagttttactgagccatatcgctttttcaattccgattgttgtcttgatggttttgccgaagttaaatgaaatgcggccagcattagttgatgcggcacgtgatttaggtgcgactgactggcaagtcctgagtaaagttattttaccgtacattagttccggcatttttgcaggctttttcatggcgttcacctattcgctagatgattttgccgtgaccttctttgtcactgggaacgggtttgaaacgctctccgttgaaatttactccagagcgcgtcaaggaattagtctagaaatcaacgcattatctgccttgatgtttgtcttctccttaatccttgtggccggctactatttattgaatcaaagaagccaagcccaaaaagcacggcgtaaacggaaagcgggggcttaaaatgaataaattaggacgcatcactttagcgattttagtggtctgtgcagccctttggtttgggacggttgaattacaaaaatcacaaggttatacgaaaaataatacattaacattatataactggggcgattatatcgacccagcacttattaaaaagtttgaaaagcaaactggttatcacgtttcggttgagacgtttgatagcaacgaagcgatgtacacgaagattaagcagggtgggactgcttacgatttagcggtgccaagtgagtacatgattgaaaagatgcgcaaagcacacttacttaaaccgattgatcatcgtcgcttaaccggctatcaaaacattggcaaggattttttgaatcaatcatttgatcctgggaataagtattcattgccttatttctggggcacactcgggattatctacaacgatcaattggttaaaaaaccactgacacattggtcagatctatggtcaccagattatcgcggccaaattatggtagtcgatagtgctcgggatatgatggccgtgggcttgatcgaaaatggccagtcagtcaatagcacgaatccggcggttttaaaggcggctaaggacaagcttgatcagatggcaccaaatgtcaaagcgattgtagctgacgaaattaagatgtatatggttcaaaatgaagcgagtgttgctgtgacttggtccggtgaagctgccgagatgttggataataatccccatttgcactatgtaattccagaagatggcagcaatctatggtttgataatctagtgattcccaagacggcaaaacatgaaaaggcggcctatgccttcttaaactttatgttagagcccaaaaacgcggctcaaaatgctgaatatattggttattcaacgcccaatataccggccaaagcactcttgccagcagcaacacggaataacccaggctattatccaagtcaaaaggtgatcgatcgcttgcaagtttatagtgatttatcaccaactgcggttggccgttataatgatttatttttagagtttaaaatgcaacattaaaagtacaatgagcagattgaaatggttcatggtataatagatacagaatttttttggatggaggttacctatgtcatttgaatggtcacagttattaacgtggcggatgctcgcaaatgtgctagacatcatcgttgtctggtattttgtgtataaattaatcatgttgattcgcggtaccaaagccgtccaattgtttaaaggcattatagtcattgcgctgattaaggttatcagttggtacattggtctacgaactgtttcgtacattatggatcaatttatcagctggattgtgattgcgttgatcgttatttttcaacccgaaattagacgtggtttggaacatatcggacgtggatcgctactacgacgcggcgttaatcccaaaattgaacaagaaaataatttaattaaagccctcgataagtcgattcagtatatgtcgaaacggcgtatcggggcgctgattacaattcaaatgaataccggtttggaagattatatcgaaactgggattgatttggatgcggatgtgacgggggagttattaattaacatctttatcccgaatacaccattgcatgatggggcggtcataattcgcgatgataagattgccgttgcggccgcttatctaccactttcagagagtaatttaattcccaaagaattagggaccagacatcgggcagccgttgggattagtgaagtaacggatgctttgacgattgttgtttctgaagaaaccggtggtgtcacattaacgcgcaataacgagttaatgcgtgatttaagccgtgatgattatatgaagtacttcaactcgcatttgattacccaagaggaaaacaaaacgagtctcttacaagaatttgttgatggcttcaaaaaaggaggccagaaatgatgaaaaagtttgttgaaggcccatggctctatcgaattttagcgttatttctagcgttgttactgtttggttatgtcaatttggatgaaattaacacgacgcgccagacgaataacaatgatacacagatgctagcaacccgcacggaaaccgtaaaagtgccgctccagattaatgcggatactgatcggtatttcattaccggctatccacaaaaggtcaaagtgaaattatccgggccgaatgcgctagtcacatcagcagttaacacattaaatttccgcgtgattggcgatttaacgaagctgggtcctggtgatcacaccgtcaagttaaaacagacggggattaataaagatatcaaagtcacgattgaacctaaagaaattaaggtccacattgagcacaaagtgacaaagcaattccctgtgcaggtcaatgttaagaaagaaaacttagcggccgggtatagtctaggaaatccaaaactaagtcaagacgtggttgaagtcagtggtgcaaaatcagcagtgaatgctgtgtcgcaagtagtagccactgttgatcccgatgaaggcaccaaaaaagacatcaatgaagaagtcttgttgcaagctgttgatcgcaatgggaaagcgttaaatgttttaatttcaccacaaaccgttaacgttaagatattggttcaaatgagtaagaaaacactcccgattagtttggaaaagaccggtgaaaaaagtggctacagctacagtctgtcatcaacaactgattcagtgaccgtgtatggtcgtcaaacagctttagccaagttgacgtcgttaccagtgagtgtcgatttatcgtcaatcacgagttcaacttcaaagacggttaaagtggctttaccacacaacatttatgagagtacgccaagtgccattaaggtgacaattacggtgactccagatacgaccaatacgagtgctactaatactgttgaagcgccgtctgaaagtacggcacaaacatcaagtagtgcgcccgttgagtcaagttcaagtaacagccaatcaagtagtcaatcaagctcaagtgaaagtagtaaagcaaataccgatgtaaatcaataatcaacgctaaagattttagcaggatgaatggagataattaaatatgacaaagtattttggaactgatggtgtacgtggcgttgccaacttagaattaagcccagaaatggcttttaaattaggacgtgcgggtggttacgttttgaccaagcacactgataaggatcaacggccaaaggttttggtggctcgtgacacacgtatttcaggccaaatgttagaacaatctttgatttccggcttattatcagttgggattgaagtcttatcattaggcgtggtgacaacacctgcggttgcctatttaattaaggttcaagaagcaagtgccggcattatgatttcagcctcacataaccccgctatctataatgggattaaattcttcggcgcagatggttacaaattaccagacgcaactgaagaagaaattgaagcagttattgatgccgaagaagatactttaccacgtccagaaggcgctggtctggggacggtggaagaatatccagaaggtgctttgaagtatacccaattcttagaacacacgattcctgatgatttagctgggattaaagtggcactggatggcgcaaacggttcaaccagtggtttaattagccgcgtatttgctgatctagaaacagaatttacaacaacggcaacccatccagatggtttgaatatcaacgatggtgtcggttcaacacacccagaaaatgttgctaaaagagtgcttgaaacaggcgcgcaagttggactagcatttgatggtgacggggatcggtgtatcgcagttgacgaattaggtaatattattgatggggacaagattatgttcattctcggtcaatatttatctgataagggtcgtttaaaacaagatacgattgtcacaactgttatgagtaatatcggcttgtataaagcgattgaagccaacaacatgcaatcagtccaaacagacgttggggatcgtcacgtcgttgaagaaatgcgtgaaaaaggctataaccttggtggcgaacaatcaggacacatcatcatctttgattaccacaatacaggtgatgggatgttaaccgggattcaactcttaaacgtcatgaaacaaactggtaagaagttatctgaattagcagcccctgttcaaacttacccacaaaaactcgttaacttaacagttaaggacaaggatgcttggttaacaaatgacaagatccaagctgccattgataccgttgaaaaagaaatgaatggtgatggccgcgtcttggttcgtccaagtgggacagaaccattgctacgagtaatgtgtgaagctgcaacagaagaaaaagtaaatcaatatgctgatcaaatcgcagcggttgttaaagctgaaattggcgcataattaaagggagtgctgacgcgagttggttaggctttgaggattaacagtaaaatgggggttatggtgtttcttgccataatccccattttgcagttcaccggaaatgactactcgagaagcgcgttcaagttggtcaacttttgagcactagcttgaaaagcacgttctcacttgaatcaaactaaaaaagcccgtcaacattgtgttgacgggtttttttggtgcaattttatttaagagcccattcttctaacgcaatgtgacttgttcgtacatcagaaaaccaaagacaaccaataagacaacagcagcggatatcagataccattctttgacaagtatgataggtgcatcagtcaaatgataatttttgcggtaacgtttgagattgaaaacactgacttcattcacgatgattaataaagcgggttctaatagtagcatgtatttactaccggttgaatcgacaatgttattggcggcaatatgtaaggcgattgttttaggtgcaacgacgataaagctcagtccgactaataggccaagaagagaaatacttcgaattaacaagatgctctttttcattacagaaactccttttctaaaattgactggtcttagtatagcataaaagcgctagatagcggaaaatatttggactataccaaaattataaatttatatataccaataaaaatgttgacattaaaatcgttggtgctattatatttaagtgttgtaccaattgattaaagaatattaaaccaaagttgaaaagaggatttttataatgtgtggaatcgtaggcgtaattggcaatgaaaagacaactgaaattttattaaacggattagagaagttggcgtatcgtggttacgattcagcgggcatttacgtgaacagcaaaactgggcatgactacttagttaaagaacccggtaaaattagcgttctagaagcagcggttgggcctgaagtacaaggaacaatcggtgttggtcatacgcgttgggcaacgcatggtgttgcgagtcgtgataatgcgcatccgcatgtttctgaagatggtcgtttttacttggttcacaacggcgtgttaactaactatttagctttaaaagaaacatacttggaggatgtccattttgtcagtcaaaccgatacggaagtcgctgttcagttgattgcttaccttgctaagacagaacaattatcagctaaggaagccttccggaaggctttaacgttgattgaaggctcatacgcatttgtcatggtcgatcgtgatgatcctgacaccttatacgttgctaagaataaatcgccattgttaatcggtgtaggtgatggctttaacgttgtgtgctcggatgcattagcgatgttgaatgaaacaaaagattttattgaaatccatgatcgtgaaatggtgacactcacgaaacaaagtgttcaaattgaagatttagacggcacttttattcaccgcgaaagctaccatgttgaaatggatgctgatgcagtgggcaagggcacatacccacactacatgttaaaagaaatcgacgaacaaccagctgttatgcggcgtttattgaacgaatacgttgctgttgatggagagcttaaaatcgactcagcgttactcagtgcaatgaatgatgcagatcgcctctacatcgtggcggctgggacaagttatcatgccggtttaatcgggaagaccttgtttgaaacattaacgcacaagcctgtcgaagtacatgttgctagtgaattcggctatcacatgccgctattatctgaaaagccattctttatctttttaacacaaagtggcgaaactgctgatagtcgccaagtgttggtacaaactaatgccttgcattatccaagcttaaccatcactaacagccaagggtcaacactttcacgggaagctgattatacattattattgcatgcaggccccgaaattgcggttgcttcaacgaaagcctacactgcacaaattgcagttgaattattcttagctgttgcactcggacgccacaatcaactggtgctagcagaacaattcgatgtacatcatgaattaggcttagtcgctgctggcatggaagctttattgagcgaaaaagaacagattgaaaccttgacgactgattacttacaaacaacacgcaatgccttttatattggtcgtggtgaagattacgccttgagtttagaagctgctttgaagttaaaagaaatttcatacatccaagctgaaggatttgcagccggcgaattaaaacatggcaccatcgctttgattgaagaggggacacccgttattgcattcttgatggatgctaaaacgattgcgcacacgcgtggtaacttacaagaagtgactgcgcgtggggcaaaagccttgacgattgtcagcgaagaatctgctgaagcagatgatcagatcattttaccaaccgtaaacgacttattgacaccattattggggatcattcctggtcaattaattgcttactatgcaagtttgcatagagggtatgatgtagatcagccaagaaacctagctaagagtgtcacggttgaataaataatattcaaaaagcctcgttcaaagaacgaggctttttttgcgtttaatgagttggtgcatatgttgctcgaggaccgccaacgtattttggtcgtgaccgtaaagctgtgacatgtgcactacccaatgtatcaagggttgggcggacagggacttgaacgaatttcacgtgcatcccaatcgccgtatcaccgatatctaatccagcttgtgcaacgatatgttcaacttcaaccggatcactgaattgttcaaaagcagcgacggagcaggcgcctccagcgtgcatagcaggaacaactgagacaatttcaaagtcgtgtgcgcgggcaacctgacgttcaatcaccaaactacggttaatatgttcacagccttgcacggctaaatgaatccccaatggattgagaatgccacgaagtgttgcgatgatgacttcaccgacttctttgctagaagccttaccgatatgaccaccgacgacttcactcgttgaacacccgaggacgaacaaatcaccatttcctaagtgtgcttcgtttagaacatcctgagtcatctttgttaagtcttgttgaatttggtttaattgtaattcgtttgtcatttaaaaaatctcctagtggttaaataattgtggtcgaatacgggataaactagtgactaacgggatggtaaccacgataccaagtccattttgaacaatattactgaaaatcgaagcgattccggcagcccagccgaaaagtaaactggtagctaaaaagtaaccggcaaccatgacgatactaccgcaaatgagggggataatcagctgctttggtcgcattgaatcattacgagtcaggtgacctacaacgaagccttgccccccatgaatgatgagtgagaagagacaccactcagggtaaccagataatagatcgattaataggccactcagggctccgacagtgagtccgccaggatttcgcagcatgatcgccgttgtataaatgccgacctcacagagcgtcacaaagccctttgtcgccggaatcgggatgatgattaacaaagaaagtgccacggtcaatgcggtgagcatcgcgagtaatggtaattgacgtttattaaagtgcatgtttagtagccccctgccagacattccccaggccatggcgtagatgaataccatcttttaaaccggcataaacaaatttctttgcgcgtgccacggcaacttcaatcgattttccttgtgctaattccgccgtaatcgctgccgaaagcgtacaaccggcgccatcaatggtagttgtttccaatcgtggagcttctaaataatgggttgttgcgcccgattttaataaatcaacggcctgttcaccagggaatcgttgaccacctttgataatgacgtgcttggggccaaatgattggataattgtagcagcttcgaccatttcctcacgcgtggtaattgacgaaaggccactgagttgttgggcctccaacaagtttggggtgacaacgctcgtcaaagacagtagttctttttttaacgtatcaaggtacgcttgctgcgcaggaatggcgccttctttaaagacgaggaccgggtcagcgatgatggttaattcaggatgctgtcgtagtcgctcacagatggcttttaaagtttccatttgatgaaccaaaccaattttaacgtgcgttagtggcacgtagtttaaaatggcatcaagctggtccaaaatggtatcctcaggtaagttgtggattttcaagtgaccgtctggtagcaatgtagcgatgcaagttaaagcactgaccccaaacgtttctaaggcctcgaacgtttttaaatcggcctggatgccaccaccacccagagtatcagagccggcaatggttagaatgttttgcatagttgtcctccaaaattctattcttaactatcatagagaagaatagaatgttcaacaacagccaattggcttgtttttttaccatccaatttgtaaactaaataagaggtgttaaaaatgattgaatggttacaatatttacctgaacaaaagccaaagtatatggcaattaaaaaaatgattattagcttgatagataaaggacaattaagttcaggtgaccaattaccgccagagcgtcagttagctaaattattgagtgtcaatcgttcaacggtgacacgtgcgtctgatgaattggttgcagatggcgtgattgaacgtcgcgttggtagcgggacgtttgtcagccagcaagcgcgactacaggcaaggcgggtcaattggcatacttatttgatcagccaacgtcagtcacaaagtcaaaatgaacggcgccaattacaacaactgattagacgaaaacctgaaaagttaattgatgtttattcaagtgacttaccattagaattagtcccacaatttcaatttcctgcattgacgtggcaagattttattactgcacaagcattggagacaccacgaggctatcaaccacttattacggcaattaatcaattggatcaacacaataaacggctattttttaccgaagagcagttattaatgactgccggtgtgcaacaatcactctttttaatattacagggtttattgacgccaggtgatgctgttgcaattgaatcaccctccttttttcatgactcaactttgtttgaagcgacgggtgtccgtgtctatgaagcttcagttgatgctgatgggatttatttgactgctttagaagagctaatcattaagcaccgtgttaagttggttattctcaatccagattatcaaaatccaacggggcacgtaatgagttttcaaaaaagaaaagcagttgttcatttatgccagatgcatcaaataccaatcgtagaagatgatgtctttggttggttaggatttgatacaactaggccaatcccaacgttaaagcaacttgatccggataatgttatttatattagttcgttgtccaaaattatgggggctagtagccgaatcgggtgggtagctgctactccgcaagtcatcgaacagttgacccgcgtgcaacatgaaatggatttagtgccaagcattatggcgcaagtcatggtgaccttagcgatgggggatccgcaatttcaaacgcagttggatcaacttaaggggacgcttcaagaacgtgcacaagcaacctataagatgcttgaaagggtattacccgattggcacgtttacttaccagcgggaggttattatatttgggtgacccatccgaaccataaattacgcttaaaaacctttattgatcatcagcttgctgtcgcaccaggatcattatttgggcttaaaacagatgcgttgcgcatcaattttgcgcgattaaatgcaattgatttggtcgcgctagaacaacgattagtagccattattaaagcaacagaataaagagggggattcggatgacagagcaattcgtaccagagatttatacaccattaaaaaccagtgttgtcggaccacctgctgtggcgcgacaagttggggggattaagatcctcggtaagaagattaaaacaattatttttaccaccgatgttgcgattgtgaataatacaaatgctgacgctgttttggcagtttatccatttacaccacacccagctgtcatgaatgccatcagcaatgtggcgacgatccccgtttttaatgggattggtgggggcttaacggccggcagccggtccgcgtacatgggattattggcagaggccgccggttcgattggcgtggtggttaacgcaccgacctcggtggagacgattaaaatgattaaccgcgttgttgacgttccgattatttgtactgttgtgtcagaacgacaggattacgccgcgcagattgaagctggagtttcaattttaaacgttagtggcgcggctaaaaccccagcaattgttagtgcaattcgccaacaatatcccgaaattccgattatggcaactgggggtaaaaacgaagctagtatattagcgacgattgaagcgggtgcgaatgcattgacgtacacgccaccgaccaatggtgagttatttgctaagaaaatggccgactaccggtctgatttagtatgataacagttgacgtgctatgcaatcctccgtatgataaaaagattactagaggaggtttttgaatgattcgtcaagcaacagttgcagatgccaagagtatcttgccaatgatcttttttgtccgaacagcgttcggattaattttacaatctaccgtatacgttaaaccccagatttcctcgcaaaatattttagaaatgacgggggtgatgaagaataataacttaggcaacgcagcaaaacagattaaagaatttcatcttcgcaaagcggataaatattatggggaattatttgatatcagtgacaacgcgttgttgtataccatcaaacatgtttatcaaggagaaaagaatcaggtttacgaaacgattattttaccgcagcagttatatccgactttgagtcttgcggatatccagatggtcaatactatcgaacttgtcaattcggctaaggaaaatttctacggaatgcagcaagatttacagctcgtcagcatggcatcaacgcatgctaaatatttagatctagaagaagatgcgttgctctttaaattgagcagtcagtattacgctgaaaatcataaagtgattgggatttcgaatcgctatgaaccagctgatacaacagaatttaatattgattttaattaagggggacttcacatgatagaatttttaagaattgatcaccgtttattacatggacaggttgcagtttcttggtttaacgaattagatgttaatacgattttagtggctaatgatagtgtggcgggggatgactttcgtaaatcagcaattcgcttggcgaagccagaacaagcgaagttagtgatgaaatcaattgatgacagtattagtgctattaattctggcgcaaccgataaatataagttgttaattgttgttgaatcagtagcggatgcggagaaattaatcaaaggaacgggcgataagattacattgttaaacgttgggggcacaaaacaacgagaaggaacgaagaattattctaaggcggttaacttaaccgatttagaagtcgatcaattaaaagcgctttctaaatctggtgtagacgtctttatccaacaagtaccgaatgaaaagaaaatgatactaccagaataaaaggaggataaactcatgaaccatatattgattgccatattattagcgttaacagcgatgttggcgaatgctgaatatttatttggatcatcaatgttatcgcgaccacttgtgacgtgtaccattgctggattaattatgggtgatatgaaaaccggaattatcatgggggcaaccttagaactggcctttgtggggtcattttcaatcggggcttcgattccaccagaaattatttcaggtagtattttaggaacggcctttgccattggtgccggtaagagtacagccgttgcgttaacattgggcattccgattgcatcgttagtgctagttattaagaatctgtgcttcatctttgttctgccatactttgttcataaggcagataaatacgcggccgagggtaattcaaagggcatggatcggatgcaattgttcggtgggttcttctcaatcaatttaccaatcggcttaatcgttgcaatttctttcatcgttgggagtccagtaattaagtcattattagcggttattccaaaatttgtcatcgatggtttaggaattgcgaccggcttattaccagcttatgggtttgcgttattgttgaaattaatggtcaataaacacaatgcaatttactttgtattaggatttgccttagcggtttatatgaaagtccctgttactggggttgccatctttggggcttgtcttgcattggtattaactggctactcagctttcaataatggacataaaggcgagacagttgctgcaagtacaacgaatggaggcatcgattatgaagatgaagaattctagtttaatctcgaaaaaagatttgatgaaggttttctggcgctccttcacgatggaatgggcctggaattatgaacgacaatcaaatttaggctactcgtttgcaatgacaccagcgttaaataaaatctataaaggcagtaaagaaaaattaacgagcgcctataaacgacatttggaattttataatgtaacgccgtggctttctacatttccattagggatttcggtagcaatggaagaacaagcggcattagatgaaaattttgacacagatgcaattaacaatatcaagattgcgttaatgggtccgctaagtggcttaggggattccttcttctgggggacgttgcgggtaattgcgacaggaattgggacttccttagcacttcaagggaatctgctagggccgctgttattcctgttaatcttcaatattccggctgttttagcacggtattacgggttattcattggctacaatatcggtgcgggcttcatcgaaaaagttcaaaaaacgggtttaatggataaactctcctttggcgcttccgtcttagggctgggcgttgttggatcgatggtggcgacaatggtgacgctgaagatgccattgacgattggtgcgggtaaaggtgcgccaactgttcaaagtatttttgatgggattgtaccaggcatcttgccattactctttacgctctttattttctggttagataaaaaaggtttgaaagcacactggattctattattaattgcagtaattggaatctttggtgcttacacaggtctactgaagtaggaggcagcaagcatgcaggatatgttgcattacattgaagcagaaccgaaaatctatgctgatatattagccaatcggcaaacgatattgcgtacgttactgaatgacaaatcaacggcatataaaaatgttgtgatttttgcaactggatcgagttcaaatgcggcgtttgcggcacagccttatatgagccagcaattgggcattcctgtttttgtcgaggagccatcttttacggcgaactatatgttgcacctgcaaccggatacgttgtatatcgccatttcccagggtgggcatagctactcaacgattgagatggtcaaacgggttcaagcaatcaacggccggatttataccatcactggtgatgaaaacagtccgattgccaagctaagtcagcatgtgattccactagggatgccaattgaagagatgccctatgtgaccgctggctatagtgccacgattttgacattaatgttgttggcgcttgaattgggtaaacaggatcaagcgagttatcaaacgaatttggcagcgattgaaaacattgtgactgacctaccacgcatcattgatgctgctaaagaatgggtagcgcattatagcgatgtgtttgatacagtacaacgcgtaatctttgttggttatggtggcacatacggtgtggcccgtgaaggtgaaactaagattacagaaacagtgcgtattaccgcactcggtaaggaagttgaagagtatatgcacggcccttatattggactccacgcaagtgatcatgtgattttcattgaaccaaacgggaagttacaagagcgagtcgctaagttacaacaatttttaaccggcaaagtggcgaaggttgtccgaattacgaatggccaagttgatcgtcaagacgacctcggcttagcgttaccaactgatgagttgttagccccactctttatgactattccaattcacttattggcttataccgcatcagcgcgcaagcaaattaatctaaaagtgtcagcttttccagattttgacccaattacaaattcaaaaatataaaaaattgaaagaaggaaattgagatgttgaaatttaacgaaaaagaattattggcaaacttagaaggcggaattgcactcagatcagacattaataaaattgtcgatcaaattaatgatgagggttatagtaatatttgttggattgggatcggtggcacttatgcatcatccatgcaagcggtcgttcacatgaaagaaagaacaaaaattgaaacattctacgaaaacgcagcttcgttcttaacaactggcaatctccgagtgacaaaagacacggttgtgattatctcttcagttactggaaatacgcaagaaatggtcgaagctgtcaagaaatgtaatgaaattggtgcacgtgtaattgggtttgttgatcgtgcagatgccgatttagcaacgatgtgtgattatttaatttcatacccattgaatgaacaacttaagttcttcatggtaggtgatcgctttatgtatttagcaggggaattcgatcaatacgacgaattctacaaacaaatggatgataactttgcaaaagatgttgtggctgtttataaaaatgcggacgaatttgctacagaatttgcactgaaacatcacgaagatgaaatgcattattttgttggggctggtaaccaatggggtgctacgtattcatatgcaatgtgctattgggaagaacaacattggctcagaacaaaatcaattgaagcgcaagaattcttccacgggatgttcgaaattgttgaacgcgatacaccagtcacaatttacgtgacagaagatagtcaacgacaattgagcgaacgcgttgctaacttcatcccacaaatctgtgctaattatacggttatcgatgcgaaagattacgacatgccggggatttcaccagaattccgcggtgcattatcaccatttatcttgcatgcggtcaatgatcgaattgatgtgcacatcgaagacttgaaccgccatccaatggaaattagacgttactatcgtcaattgaaatattaaaatggctggaggaacagagatgattggagttgtgatttgtacgcatggtgccgctggtagaggtctagttcaagctgctgaaatgatttgtgggcaacaagcgcatttagcagttgtttcttatgaaatgggggaaacgacagaagctttacgccaacaaattaatagaagttttgcatcatttgaaccactatctgaaatttttgtattgactgatattaaaggtgggacaccttttaatatgatggttgatatcattcgggatgcgccacagtatcgactcgtatcaggtgttaatttaccgatgttacttgaattattcatcaaccgtgacaacttgggattggatgcattaacagataaagtattagcatctggtcaaaaggggatttatcaatacactgtttcaaatgaggatgctgacgaagatttctaattaataacaagagtcgtgctgtttaaaaatagcgcgactcttttattatgttttacgtgaaacattctaagccattgttccacagaaatcccgaaaagttagcctaaactaaaatatttgttaattccattaaaatcatgtatgctgtagtgagaaaagttaggtttacctaaaagaacggaggctctttatgttatcagttaagaacctcaccgttgcttacgatgacacaccagtatttactgatgttgccgttcagtttgacgcaggcaaaatcactggcatcattggaccaaacggtgcaggcaaatcaactctgattaaagcaatattagggttggttaaggcacggcaaggctcagttttatatcaagatcgaccaatgcgcgcagttcagaagcaggtcgcatacgttgaacagcgtaaagatttggatttaaattttccaattaacgtttttgacgtggtgctaacgggcacgtatggcaagttaggcttattccgcgatccgggtaaaaaggcaaaacaagccagtcgcgcggcacttgaacaagtatcgctcagcgaatttgcgcaacgccaaattggccagttgtcaggtggacaattacagcgagttttcgttgcacgcgccatcgtccaagaagcggatattattattttagatgaaccgtttgttgggattgatttacagagtgagaccgcgatcatggcaatcatgaaacagtggcgtgatgcgggtaaaacaatcattgtcattcatcacgatttgaataaagtatcgcaatatttcgatgatttagtggtgatgaaccacggcatcgtcgattatggaccaactgaaaaagtttataatgcgcaaaacattgagcgtgcttttagtgcggacttatccgctgtcttgtttgatgcacaggaggtggcaaaatgacgagtattccagcttttattagtgcgttgggtcgttatgaattcttgcagagtgcgttgctgaccgccgtaatggtcggcatcatgtctggcattgtcgggagtttcatcattttgcgcgggatgtcgttgatgggtgacgcgatttcacatgcggtgttaccgggtgtcgcagtggcgtacatgttgggaattaatgtgctggttggcgcatctgtatttggtattttagcggcggtcttaatcggctttgtcgcaacacatagtaaaattaagacggatacttcgattggggtcgtctttagtgccttttatgcgcttgggtttatcctgatttcgatggccgaaagtgcaaccaacttacatcatattttattcgggaacattctcgccgtcagtgatagcgacattatgagtacggcgattgtcttaggcttagtgatcttattcgtctcattcttctacaaagaattattgattacctcgtttgatgaaacctatgcgaaaacatatgggttaaaaacgcaggtgctacattacggtttaatgttggtgctaaccttagtcacggtttcagccctacaaacggtcgggattattttggtcgttgcgatgttgattaccccagcagccaccgcctttttatggacggatcgcttagtgacgatgctcttcttatcggctgggattggtgctgtgtcagcaatcagtggattgtacttcagttacacattgaactgggcatctggtccggcgattgttctgatggcagccgtgctctttgccatttcattcatctgcgcgcctaagcaaggtttccttaagtggcgcaaaggaggacgaccagcatgaaaaaaatgattgtgacgttaattgcagtttttggtttggtgggtggtgtgtatggtttcatccagcaccgcgcccaatctaaacaacaacaaacgaaccagcagactaaattacgtgtagtgaccacgaattcgattcttgaagatatggtccataatgttggtcaagaccacattgaactttacagtattgtgaaacggggaactgacccgcatgaatatgaaccgcaaccgacggatatttcaaaagcgactgatgcggatgtgatttttcataacgggttaaatctcgaaacgggtggcaatggttggtttagaaaacttgttaagatcgcgcataagcaattcgaaaaggatgttttcgctgctagcaaaggaattcaggtgcaacatttgacaactaaccaaacagaacccgatccacacgcatggttggatttggcgaacggtattcaatacgttgaaaacattacgaaagcgctgcagaccaaagatccagcgcacgctgatgattaccgcaaaaatgcggatcgctacactgcacgtttgcgcaaattgcatactgatgcgcaaactaaattcgccgatattccagctaatcagcgggtcttggtgacttcagaaggcgcctttaagtattttggtaaggcctatcaggtcacaccggtttacatttgggaaattaatactgagtcgcaaggcacacctgaacagatgaagacggttcttgcaaaaattgcagattcagatgttaagcatctgtttgttgagagttctgtttcgccgaaatcaatggaaaaagttgctcaggaaactgggttaccaatttatgcgaaaacttttacagactcactcgcgcaaagagggaagcaaggtgacacttactatacgatgatgaagtggaacctagataagattcatgatggcttagtcggtcaataaaaagataatttttagcaattaaaaaagcgggtgcttagacaaaaataaatttgtctaagcacccgctttttttgtagttatccttgttgagaaagggaacggcgattggcgaagggaacgagccgctttttttgttttaagaaccgttgccggtagtaacgatattgtggtgtgaatggatgggaagatgaggcatgccatggcttttcgtgaccacagaagtgaacaagcgcaggttctttttgggtttctaagaattgttttttgaggtgttcagttggtggtgtgatggtgttcatcaaaatgtttgtttgggcattccacatagggtgaaggtgaatccaccgatcatgcaaaattgcatttaaagcatcttgatcgtggaagcgtaatttctcagggtgctgattgatgaagtcgagtacacggctgacaatattgtgttgacgccattttttgagattgagtaacatcacaccggagttaaagtaacgcggactttggtaatcgatagccattttttctaagcgttcgtggaacccagcatcttctactgcagcgaggaaggattggcctaagtcgatatcccatagccgggctaaatctgtgaggcatagcgcatcgcaatcgatgtagagtgcacgatcgaggtgagggaacacgtcgggaattagaatccgatagtacgccgttttcaagatccgatcactttcaacagtattggccagtaaagattcgttgacctctgcaaaggtcaagtcggcatcaaatcgagccacaacatgctgtaagactgctttatctcgtgcggtgaggtggtcttctaagacgtaaaaagcatagtgtcgatgtgagtcattgtgattaagaattgaggcgtatagaattgccagcgtttcgatgaaatcggaattgacagccgatacaatgttgattatatcggattgttgcgcatgtaattgtttgagttccttttgatattggtttaagaaggggtgactttttagagtgttccaaggtttctcgtgtgttgtgaagtgaacaattgccgggttggcgattgcttcatcaaataaatgggcatattcagtgttgataggcgcatgttttctaaagagcaatgagttttgtacgttccatttaggatggagtagtttcactttaccaaccaaagtggcatttagcgcatcttgatcatggaattgtaagcgatccgcatgatgattgatgaagtggaaagtccgctctgtgatggatgcatgattccaccgaaccgtatcaattagcatgacccctgaattgaagtagatgttattcgattgtggtggggtgatgccgagccgtcgcagtgtgagtgcttgtccaggatcaatcacggcacccacgatatttgtgcccaaaggcgtattgtatagcggcgtgagatcagtttgtacgaggatatcgacatctaaatataagacacgttcgattttttttcgcaacaaaagagttggcgctaaaatgcggtagtaagccgttttgttgatatggttgctttcaggacagttttcaaaaagctgcttattaagtgcaataaactcaacttgattggggcgtggaacgcgcttggaaacagcgtgtttcgtttgcggagtgagttcattatcgagaataaaaaaattaatagtagttttgggcgaaatatgggttagagccgactttacggcgattaaaagttgatcaccatagttttcatctgcggcaaacatgatattaatagcgttgataataaccatctccttttaggtgttgtgtctttatttaaacaacttcaacaatctttgtaaagttaaatgattatgctaacaataacaaaacgtaatcataaaagttgcatcaataaatgtgattgttttatattgatggtgtagcgttattaaagatttcatgaaaggaaggttgcttatgcaaaaagaagtccgaattaggaaagttaggttaggtcgtagtacagtcaagaccccagaattgtgcttggtgattaagaaagaatcagccaatctaaagtgttttctagaaggtatgactgatttggaggaagcaattttaagagagaataacggtgaggccctcgtcggtgagagctgggggccattggaatttgatcatcgtggtcgtgtttttagtaacaagacggtaaaaatgtgtcttcaaaaattggatgataatcgatgatcctagcagccaaagtggttgattagagaggatgagtcgatggtttcgcgcatattaccaattaaaaatggctacaatttcagagaactaggtggctatcaaacactggatggtcgctcgattaaaccgcatcgattattcagaacggggaatctggcgaatcttagtaagagagaattggtgctcttggaaagctaccatatcacctatgtcgtggattttcgttcaccaatggagcgcaaaaaagcgccagataaaaagattacgacggcatcttacgaatcgttgccaatttttaaagaagatgcgacgcaaagtacggcgagtgaagcggaactttatgagcgctacaccaataatccgcttggtgggcagcaacaaatgcgccaagtctatcgagaaatggtgcaagatccctattcaatcggaatgtatcgccaattcttcgaacgattattgactgaagccgatccgcaacaagcagttttatttcactgtacaggtggcaaagaccgcaccggaatggcggcttattatttattaaatgcactcggggtacctgaagatgtgatccaatatgattatctattatcgaatacagcatctagggaacacgttgcagcccgcattaaggagctacgtcaaaaagatgcctcaagcggctttttaaaaagtatgcatgcattgatgagtgttgatcagtcctacttaaacgcagctgagcgcataatcaatgaggattatggttcaactcaagcctatttacaacaggccttaggattaacaacgcaggacattgaacatttaaaagcagtgtatctagattaattggaaaagagggaacaagaagatgggtaaaccagatttaaaagatccgcgaacactttatcggacagagccatttcaagaacaagaacaagctagtccggcattgcaagatcaaatgcatcccaagccagattgtggcgaagaacactaccgtggtgcacaacggttactagatcgtaaagtgctgattaccggaggagattctggtatcggtcgcgcagttgcaattgcgtttgcccgagaaggagcagacattgcattgcaatatttgccaggtgaagaagtggatgcacaagaagtggctcaattggtgcgagatgcagggcgtaaaatcgcattgatcccagctgattttcggaaaccacagattgctagccaagtagtggaaaccgcgcagcagcaaattggcacacttgacacattagtcttaaacgcagctcaacaaattgcgcatccatcaattaccgaattaccaatagaacaagttcaagatagttttaacgttaatgtggttgcgatgtatgcgcttgtgcaagcagcattgcctcaattaccggctggcggcagtattctgacgaccacttcagtgcaagcctttaatccgagtccgcatttgttagattatgcagcaacaaaagcagcaatcaagaattttacgatcaatctagcgcaacaattagcggataaaggtattcgggtcaacggggttgcaccaggtccgatttggacaccgttgcagttggctcaaggacaactggaaggggctttgcctaagtttgggcagaatacattgctagaaagagccggccaaccggcggaattagcaccgctatatgtttttttagcaagcaacgcagcaagctatattaccggtcaaatttacggcgttaccggtggcgaatcaattaattaaacaagtgcatttacgataatttaataatattgataagcgtattgttttacggatgctggttgaatttgttacatttatggagaaccagcaatatattttaaggaaacaagaaaggatgattgttatgttacattggttatgggttttaattattggcgctttaattggggtgattgcgggggcattaacaagtcgtgatttacctgcaggttggatcggcaatatcgtcggtgggttagtcggcgcctggctaggtcaatcattgtttggcagctggggaccacagcttgccgggatggccttaattccatccattatcggtgccgtgattgtcgttttcgttgtttcattattattcacacgtagaaaatcctaatacaaaggggcggacaccatgaataaattaactaaagtggtgatcagtttagccagtttgcttgggttgtgtcaggtagcgtggtttatcacattaatctatccactacaacaatccaataagcaatttatgcatcttagttggctacccgaacaatgggtcggtaattttggacttggattaggagtgcttagcggcttaattttcttatatttactgctattggcattattcagtccaccgaaaaaacgccaaatgatcatcaagaccgataaaggtgaactagcactttcccgcaaagcggttgaaaaaacagtgacacaagctattattgaaaaacaccgtgttaaggaagtgttagtccatacgacgtttaaaggccgacatccaaaagtgactgccgacgttcaagcggtcgcagtggatcgcaacgatctcgatcaacaagcacgggcagttaaagaaacggtacagcaagcattacaaacaatctttgagatgccgattaaagcagtgaatgtcaaactatcaccgctaagtaatcaggcaaaaagtgatgtgaggtgagacaaatgagacgttcttattggggctttgttgttggggcagtgttggcagccatttggattagttttggatttatgagtttaatcttgattatcatcgctggtttactcggctacattgcagctagtttaacagggtctaaggaagatctagaaggatttagatcacaagttaaccgggtcttgaagcaggataaataacggaggtgtgacaaaatggtagaacaagcacatttagatgaagtgatggccaatagcaaattgacttttgaagatgctgtaatcgccaaaattgctggtaagacagcgcaaaacattgatggcttattatcgatgaacggtaatttcttcagtgatattgcggatcgttttagaaacgatagtgatccaacgaagggcatcagtgtggaagttggcgaaaaacaggtcgcaatcgacatgaccattattttggaatacggccggaatgcacgggatgttttcgaacgattaacagctgcagtgactgaagctgtcgaatcaatgaccggtttgagtgttgtcgaagttaacagccatgtcagtgacattatgactaagaaagaatggcaacaacaaggcagtaatccaaagaaaagtgattctgaaaaacgcgttcaataaaaatagtaaaggatgatgaaaacgatggataaaccaaacaaaccaatggataaaatgatggataagacaatggatcaacataccgaaaaaatcgaaaaagaattgaacttctcggatggtgtgattgaaaaaattgcgggccaaacggtgcatgacatcgatggcgtcttagaattatcaggcgggatgatgagtcaattagctgatcgtttcagagaccaagaagatccgacaaagggcgtcgacgctgatattgataaccaagaagtaacgattgaattggatgccatcttggaatacggtaaatcagcgccagacatcttcgaacaaacaattgaacgcatcgctaaatcagtacatcaaatgactggtttaaacgtgacgaagattaaaatgaatgtctctgacttgatgaccaagaaagaatgggcagcaaaacaagattctccaaaagaagataaataaaaagaaggtatccggtgggccggataccttctttttgtatagattagtgttcaaattggtttaaatctaaatttaatgccgttgcgactcggcgatcgtattctggatccgcttggtagaactgtttgacttcttggtagaactgtttgacttcgcggatttgaatttcaggttttgtaacttggccgagatttaagcgaatgttttcgattagtcgatcttgttcttcatcagttagtaagttgtaaagcttatcggctgctgaatagtaatcgggatcggctggatagttaccggtttgaccgctaagttggtcgccatgaattttggcagatgggacttcttttggaccatcttcactattaggttcatagttgacgcctgtctcttggttttttgccatgatcccgtcgcgttcgtaattatgcacgggcacttttggccggttaacaggtaattgttcatagttggcacctagacggtaacgttcagcatctttataaccgaacaaccgtccctgaaggagtttgtcaggggaagcttcaatcccaggaactaagttagcaggtgagaaagccaattcttcgatatcctcaaagttgttggttggattttcatcgagtactatttgaccgatttcgattaaggggtaatccttttgtgaaatgaccttcgtcacatcaaagatatcttgcggatagtttaaaccagcttcataaggaacaagttgaacggcaacggtccaacttggatggtcgcctgtttcaatcgcatcgaataaatcattttgtagataatctgtatctttaccagccaattcggcagccagttcgttacttaagttatggacgccttggtttgtcttgaagtggtattttacccagaactgctcaccagcagcattcacccatttaaaggtatgactaccgtagccatgcatcatccgataactagcgggaatcccgcgatcactcattaaaatcgtcacctgatggactgattcaggtgaaagtgaccagaaatcccactgcatgtcttggcttctcgcgtgtgttcgtggatctcgtttttgggagtgaatgaaatcagggaatttcagaggatcattaacaaagaaaacgggcgtattattaccaacaatgtcatagttgccttcttcggtatagaacttaagggcaaatccacgcacatcacgataagtatcgggatagccggcttcaccagctacttgtgagaagcgcgcaatcattggtgttttcttaccagcaccactgaaaatggctgcctttgtgtaggcgctcatatccttagtgagttggaagtaacctttagcaccggcgcctttagcatgcacgacccgttctggaatccgttcacgattaaaatgcgcgagtttttcgagcaattaataatcctgaattaaaacgggaccgcgttgaccagcagtttgcgaatgttgattatccgcccacgtttggccctcattagtcgttagtttgtttgtcatgtaaatagcctctttcattgcactttgtgcccagagagataagacagggtcaactcaactatattatttctcagcgaaactgcaatattattgcttgtgcaaaaagccactaaaaaacggtttacaactaataaaattagtcgtaaaccgtcatgttatctgctgatgagacgcggcttaatgtattgctggtataaataagcagccccaaaaaagtaactagttgccagtaaagtgacgagcggcaaactttgaaacatttggtgtgggagaataatggccaataaagggaaggcgtaggcggcgggaattctgacttgtagcagatagagtaatgcccaaactagtggcagtgcaattaaggttaccaataaccgtgaatcaagtaagctataagcgacgaatccgattgtggcggcgccagttaatgcaaccatctgcttgatggccattttacctggatacattggtttttgtagaatttcaaaaaagacgacaagtaccggcggaatggcagccatctgtggccggccgagtaaactaacaactaacacccataagagtgcaatgattagaaaaaccagcatgacgcgatagttaatcgtggcatgatagggatgttgcagatgcaatttgcggaggctaacgaccaacatcaaagtgagcgtaaagcctaaaattgcaatgatgaatgaaagttcagtggcgttgacgataatcggtaacagccccgttgcaaacgatggtgcgagtgttgagcgaaataaacaaagtaaaacaatcatgatgagtagtagtaagctaattttaactgcataactgagcggcaaccgattaatgccaaacccaacgatggcggttatcgatggcagccaaaatatcttggcgggttgattgagccaacccggttcgtgataaatccacagccccgttgttaaggctgcgatttcgggtagaataatctcaacatcgttcaagacagtggcaatgcccaccatcaataatacgaatccaaagccgagtaagtaatccgatagttttaatttttggggtttcaaaagataaatgactccttagtgtggtttgagtaatagtatttattatacgctactgaaaaaagaggacaactcaaaaaagagcgtttcaactaacgaatagctgagaccgctcttttttgaattaaataattattagtcgttcaagttatagcgtaatttcatgtgttctgagcctgaaatcaccatttggccaagtagggctgtttggcgtttaagtgattcgctggctaatttgttattagcggcttccaagaaggctgcagcgtctttttgatcagtgaaggccttgtcggtttcgttttggatcacgtgataggcactcattgcttcgagttcgaaggtgttacgcatatcaacgtagaagtcgtaatctgtatcgccaagtaaggcggttgtacagcttaaccagtacatgttgttcaagtcaaaaatacctgtggcattcttgtatgattctggtgtgtcgttgatattcgtgtagaatggcacgacggtgttaaatgtattggcaccataagctaaccattgaataccggcaatttcagcaggcacgttgttgcgcacttgtaaaatatgcacgttgtgattccggttaattccgattggccggaaacgagttttaacatcttcaggggcgctaccgtaaggatcgtattctgtattttcaaagtgagcgctcaagacgaacttgacgtcttcgattgaaatcttgcggttggcatggcagatgaatggtaaatcttggtccattggatcttgtttgatttcaggattgaagtattgttgaccgtaccatgtccgtgggttgttataaaccgtatctttgattgaagcactgccgaaaatatgacggagattgtagccttcaaagtcaggatttaagtggttgtcatcaattaatgtttttaaatcagctgagcaaagcgtgtcggctgaatcaaagtcgaaatgattgatgttcatccggttaggggcaaccacgtatgcatcatcagggatgcgaacagcagcccagtgatgaccaccgattgtttcaagccaccaaacactgtctttgtcagaaaaggcaatcccgtttggttcgtatgtgccgaattcttcaaggagggcacctaaacgttcgaccccttcttgagcactgtggatgtaaggcaagactaatgtcacaatatcttcttcaccgatgccaccagggacaaaaggatcaagcccttgaatccgggggttagtggtaatcgtttctgtggcagacatcgtgatgttttcactgttaatcccagcagctggccaaatcccgttcgtcaataatgagttaggaattgaggtatagcgcattgggttatcaggcaattggatttgaacgccgctaatcaccgcttgataattccggggttggtcttcaggattgaccacaacaaagcgttgtggatccaaagcttcgtggccatcatcatttctagaaatcatggttgaaccgtcgatggaagcttttttgccgactaagaccgtggtacatgaccctttaattggtttttgcatgtcaaaacactccttttatttattatccatagtataacgcttttggcgggaaagtgggggattgagcgataatcatgtgaaggaattgtttaaatgcaagtggttgagggtgccaagtcagttatcattggtattcaattcgttggtatcaacaaaaagattcggatgagtcgtcaacgtaaagcacaacatgcaactaatagggctgaacaacatgccgaaaagaaggccatacaatacagccgttttcagcaacaccagattaagaagcgggaaaaacatcggagacattgaaaaagaagaggtgggggtaatccgcatctcttccttttaatatcgtcagacaaaatatgaggtttagttaaataatgatatactcgatttgatttaaaggaaagaggggactaatgctgaagttagccgattgtttattagtgattgatctccaaaatggtgtctgcaaaagtgagcagcctgttgcgcgtcttaatcaattaattaaaggcgttaatgccagaattgatgcctatcaggcggaaagtcgcccgattatttttgtccaacataacgataagactttaattgctggtcagtcgacttggtagataatgccagaattgaatgtgcctaaaacggcaatctttgttcaaaaaacgcatgcggattcattttggcagacaaacttacaaacgttattgagccaaatgcaaatcaaatcgcttgaaatttgtggtgcccagaccaaatactgcgtcgatacaacgattaaagttgcccaccatttgggctaccaactccaaatggtagctggtctttcaactacaacggacaacgcctatatgacggctgaacagacaattgccttttacgaaaacgtttggcagaaccgttttctagaattactaaaataaacggtaatctctggtacaatggaccttatcatcacttaagaggagtatctattaatgtcaaaaacagctttaattacaatgcaaccaacagaccaaacgacagggacaacggtcatttacgcgccagataatgcggccaatcgtgtgtaggctgctaaacagtccaacgtacaactgatttcgattccaggttatgttcgttttggcgatcatatcgttaattttttcgttaaaaaaattgtgaaacaaggcgatgtttcggcatacagtaatatgttacagtttgtttatttttcacacatgatggcttacaacgtggcaaatacgccagttgaaagattagtttttgcaacgcaagatctagcgactaaagtattgatgcagtttgataatcaagcatgttataataatcaaataacagtcttagccaaataatatagaaaagccccgctcagatgagcggggcttttctatattatttttataagttaatgatttgtgcaacctcaccgtggtgtccgctagttgttaggggggcattaacaccgctgatatcgtctatgttggttacaatcaccatactggttgcttctttacccgcagaagcaagcgcagctaagtcgatttcaactaataactggtctgttgtcaccggatcgccttcttgaacgtgaatggtgaacggtgcaccgtttaattcaacggtatccaagccaaggtggagtaataattcaacgcccgttttggttgtaatcccaagtgcgtgttttgttgggaaaacactagagataataccgtccactggtgagtagatatgactatcactagggtttactgcaaaaccatcacccatcatttttgttgaaaaaacggcgtcggttacttgtttgagcgggatgacgggtccatctacaatagcgtgtaattcgagttctttgggtttacgtgagaatagtttcataatgatgactccttctacttagtaaaatattcgctgataacgttcgatgaatcagctaattggttcgtattagcggtgaaatcttgttctaagaaactgtaatagagtaggtcgacagcgtaaagctgtgcaattaatgaagtcgttgccgcgcttcttagctgactgttttcagtactatcatcatgctgtaacgtgatggttgctaactgtgcgatttgactttgattattatgagttaaaacaataattggaatattaagttgttgtgcaattttagcaagttgcagaggctcttgtttttcgccagagttagaaattaagataagtgctgcctgtgttttctgtgtggttagtgctgctgccagtagatgcgtatcaagtgattgaatgacagatttaccaacgcgcagtagtttttgttgtaaatcctcagcggcaacgtttgaagcaccaagcccataaatgaaaatggtttgtttcgagtggagaatcattgcggattcttcgagcgcgtcattcttgagccgatgattggtttcagtaatcgcttggttaattcgaaaagttagtttattttttaagtcagttgttgtatcggtcggattaatttcatcgaagagccgttgatcggtattcccttcagatgaaagtcgtaatttgagtgctggaaagccaccttgaccacagagtgttttaccaaagcgagcgacagtcgctgcactaacgttagccgcttttgcaaacgcactagttgtcattgtcggtacttgtactggatgggcaagtacgtattgagcaagccgctgttctgttttggttaaagttgggagtttcttttgaattgaaaaaagtatgctttccataaaatcagcgtcctttaaaggttatttttccattgtagcatctttgggaatgccaaagaaataagttgcgacaaagccaccggcataagctgcgagcaagcctaagatataagcgaattgatggccgtttgtaattaaaggaattaaggctaagccactaggtccgatggcaatcgcaccaacgccgcccattgcaccaatgacggcaccgccaatcccaccaccgatacaggcagtgatgaatggtttccctaatggtaaagtaacaccgtaaattaacggttcgccaatgccgaggaagccaacaggaagcgcccctttaatcatatttgtgagttctttattcttacgacaacgaatccaaagggcaagtgcggccccaacttggccagcaccagccattgctaagatgggtaaaagtaaagttgaacctgttttgttgatcatttcgatatggattggtgtgaggacttgatggagcccgaacattaccattggtaagaagagtacaccgagcgcgaaaccagagaaggcacccccgacattcagaatccaattaattgagccgacaagtgaatttgaaatcacaccggctaccggcataacgatgaaaattgtgaagaccccaattaataataatgaaattgtaggggtgacaataatatcaattgaatctggaataaattgatgcaatttcttttcaaccaatgagagaatccaaactgcgaagatgacaccgataatcccaccttggcctgcagataaaggatcgccattgaagatattgtgtaatggcaacttaggatcaacaccacttagaagtgtaacagcaccaatgacaccacctaaaccaggagttgcaccaaattctgtggcactgttaatcccaacatagattgcgagataagcgaagacgccgtttttgatgacgtttaagatggtaatgaattcagaccagtttgaaccaagggatccagcgaccatcatgtttgatagaacggcggcaattcccccgattaaaccagcgccgacgaaaaccggaattaaaggaacgaaaatatttgaaatcgactttaagacccgcttggttggcgtactcttttgttttgctttttgttttgccttaacttcagcggcttttgcttcgactttttcgcggtcggtcattgttgcggctgtggcagttgtggtgagattttctgggaagggttcaccaagtttaacaccgacttggtcgaccatgatttgggcgactttattgacaatcccaggaccaacgacgacttgaagcgtgtcttcttcgacaacccctaaaacgccatcgattgcttttaacgcagtcatatcaacttgatcatcgtcacgaattgtcatccgcacacgtgtcatacagtgaattaatttagcgacgtttgcgggtccgccaacagcggcgtaaatttctctggctaagcgtacttcttttttttcagtcataatagtgcctccttaaggtttgttattgaatagtttgacgtacaaaaccgtgtgcttgtgttaaacgttctttggcttcattagccgataaatccgttaaaatcataacaattgcgagtttaacgtcttcgttggcggcgctaaattgggttgccgcaacatcgtaagtacaatcagttgcagccatgatgattcgtttggcacgttcaactaatttttcgttggttggtttcacgtcgaccattaagtttttgtagactttaccaattccaatcatcgaagcagttgataacatattaagcaccaatttttgagcagtacctgatttgagccgggtcgaaccggttaaaatttcaggaccaacttcgacttctatattaattgtggcatgttggctgatgagggcatcgaagttgcaagctaagctgacagtactggcaccaatttggttggcataatcaagaccgccgatgacatatggggtccggccgctagccgcaataccaactactgtatcgttagcggttaagtggattgcttccaagtcttcgcgacctaatgtcggtgaatcttctgccccttcaacggcaacggtcattgcttgcataccaccggcgattaaaccttggaccagttccggttctgttccaaaagtagggacacattcggcggcatcgagaacaccaagacgaccgcttgttccagcgcccatataaattaagcgtccctcattttggaaactttgaatgataacttgaacagcagcttcaatattggggagtgcttgtttaacactttctggcacattgtgatcttcttcgttcattagtgtgagtactttttcaattgaaagttcgtccaattgcattgtcttttgattacggttttcggttgttaaatgacttaaatccatattaatcaatctcctttagttggatggcttgtccagcctgaatgaatggcagtaatgcgtgatctttttggatgacttttccaagaacgttaacacgagaatctgcgggtaggtcatgtttggtaatctgtaactcgcccatataacgtccatagtcttggttatcgagggtgatgctgccacgtaatcgtactgatgtctgttcaggttggattgtggtctgacaaagtggccggccttcttctaatctgatgacatcacgggcgacatcgcgccgattatggaaatgttggttaaaaagataaggggggcagggggctgacttaagcatgtacaaggttatgacgtgttgatggtagaatgcatcaaattgcgctagagtggtttttgctaaagttggatcaccgatgaagaccttatctgtttcacagttgaataaatcgagcgcactagcaagcggatgctgataacgatgggcttccaaagtgggtaatccttcttcaagtggtccgcgtaaaatgccatcaccaggaacaaaagcttgaatggttaaaccttgcgttttaagccactgatttttttcagtaaaccaggttcgttctaaaccggtttcatttctagggtaataattatgccaagcttctatgttagcgaagttggcaccagctgcgcgtaaaacggctaaatcttgttcggcaattgtgcttgcgttgagggcaatcttcaaatattgtgataacttagcaatggttgaattatcgatgccgaaatcaattcgcaaaccagtaatcccaaaggacagtattgcggcgggatcgttaagtgagagaccaactgctggtaatgaacttgtttcaatatcaatcatcaattgtaagtgttcttcgcgacacgcagtgctgagtgctttgattctagcagtgtattgtgaaatgtcatcttcaggaatatgcatcgacgtgaagacttctgtgaagccagcggcgtgcattttttgaaggttcatgcggcttgctgaggtgaacggttgattaagatagatagaaaaaccaaacataaagcaactcctttctttttaaagcgttttctatagatgcagtatagcgctaatgaaattaaatttcaataaaaaataaaaaaataaatatttagtgaaattaaattcataactgtaaccagtgatgaatgtaacggtttccaaataaccgtttacattttactaaaagtttagtaaaataagattgcaatctaaaagaatgcgtttacaggatagttcttgtacagattgatttatttgtatggtgtaaatagtaaacgtttactaactaaaagagaaagaagcgactaggatgaacgacaacaaaattattatcgatccagaccaatttgctgcagcaattatcgctgggaatcccaagcaaacgaatgaagacaataaggtttatatcaagcgtcaattgacgttatatctagaatcagttttactcgccaacgattttaattcattggaagaaaaccaattcggctcagccaaagaaaagcaacgccaagcgattttggaaaaaattatcgaacatcgctatcactagagtgcgtcatcaagcgggataacccgagggttgtgcttgatgaaagcatgtttacaatgaagaaactatcgaaaggaatctaaagaaatgaaaaaactaaaagatgttaaacagtatagttcttacgcttttggggcctttgggcatgacgccttttatgcaacacttagcacttattttatgatgttcgtcacgagtcaattattcgataccaaaaatgcaggctttaattcaaaaatgattgcgtatgtcacttatacaatgatggtcattcggattgttgaaattgccttcgatccgctgattggtggagtggttgataatacacggacgcgttgggggaaatttaaaccgtggttactggcggggtcaattattagttctgttggcttggccatgatttttaccaactttggggggcttgcgacaagtagcccttatctttacttagttctttttgcaatcgttttcgtgattttagatatcttctactcgtttaaagatatctcgttctggtcaatgttgccagcgttgagtgttgattctgaaaagcggacaaaattcggggcgattgcgcgtttcggatccactttaggtgcacaaggggtcattatcgtgattgtgccaatggtggttttcttctcgcaactattttctgggagtcatgggagtgaacaaaccagtgccgggtggttcggttttgccgttgtcattggccttgtttcattcttaggcgctttagcaaccatcttaggaaccaaagaagaaaagagtgctattcgggaaaatactgaaaaggttcggttacgtgacgttttcagtgtgattggtaaaaatgaccaattaatgtggttatctctttcatatttcttatttgcctttagttatgtgattacgaactcactgcttttatattattttagatatgtcatgggccgcgccgcagcgttctcaacggttggtgtgattactgccatcttagggattgtgtcagttgcgttgttcccaacattagttgctttaattcatcgccgggcaatctatcttggcggaatcgcaatgatgatgcttggttatatcctcttcttgtttgctggaagtaacttggtcgtagtcttaattgcggtcggcttattcttcttcccatatccactggtctttttggctgctttgatgacgattaccgatagtgttgaatacggacaattgaaaagtggtacacggaatgaatctgtaacattggcagtgcgacctttattggataaactagccggggcttttgcaaacggcgtcgttgtgacggctgcgattcatgctggcatgactgggaatgcgaaaccaagcgatatcactaacgcggggttgttgcaattcaaaatgtacatgttcttcattccaatggcgttattggttatttcagcgttaatcttcatggctaagattaaattaacggaagcaaaacatgctgaaatcgttagtgagttggaacggaaattagattaataacaaacaaagcgtagttagtctatgcttgaaccagaggctgcatcaaaagtaattttgatgcagcctttttatgactgattagtttatgggcttaacttgacgctgagaatgccgatgacttcttggttaacagtgcccaattatttgaaccagtcgtcggtcagtcggtagattgggtgctattcagaactaaaatcgaaagagccggcggaacggattctgcttttggtttgactgaagatggtgactatcaatacaagacggcaaaagggcttttttagactactattatcaaaatgtcttctttcaatcatgtaataaattgtatcgaagagcgattattaaagctgaagcattgcggttcgatgaatcgctgcgtatcggtgaggatttaattttcaacttgcagtatttacaacattgccgagttgttaggcatcgggcagcgtttttatatgtttacgagatagggcatgctgaggcggctacgagtaccctaaagccgcagtggttctcagttaacttaacagctctgcacatcattgagacgcaattagtggctggaattgcagaagtggatcgcgcagcttacacacgatttttaaagcagtatgtgcggaccttttttagaatgttaattgtttttgatcagcgcacactgactgttcctgagcgacaattcattcagacgcaattgatcaatttagaacgtggtttaccaaccggcacatcccggtggctacgatggcttaatcggtcgcacttagcgccggtcatgctagttggcttacgtcggttaaagcaaaggttaaaataaaatgctgtccgccagaatcgaacgattcaaaagggggacagcatttattggttcatatctaaaaaaggatgcggtgggcgtttaaacaaaggggaattgactgtgaaaaagatcagtatcgtgattgtaatcagtagtattgttgtgattagtctggcggcgctaggtttttatttgcatcaagaggataaagctgttgatgcgattaaaaccgggtctagtcgaatttcaaaacaaattgatcagtgaaagccaatctcgttcctattattaggcgttgacacaggcgcggatgggcgcgttgatcgtggtctgtcggattcgatgatggttgcacttaacccggtgtaagaagcaacggtggtctactctattccgcgtgattcattggcagagatggcagatgaccacggcggtaatattcagaaaattaatgcggcttatgaaattggcaaggctaagatggcgaaaaaaacagttagtcagtttttagggctcccgattgactactcggtgacggtcgatatgggcgcactcaaagaattggttgattttgtcagggagattaccatcgatacggtgattgacgttaatttgaatggacaagtgattccacaaggccaccatcatctcaatggtgatcaggcgcttgcttatagtcggatgcgttatcaagatccgcgcggggactatgggcggcaattgcggcaacaagaagttttgaaacaggttgcgcaaaaaattcaaaagccaaaatatttgatgaacattggtgacttaatgactaagcttggtcagaaaattagcactgattttacagccgaccaagtgaagcagttgattcgcaactatcatcaaagtagtggtgaaattgtcagcagccaattgctaggtaaaacggcgtggcttaacggcagtacctatcaaatcattagtacagaagatttgcaggctgcttcgaatcagctccgtgaaaatttagcactgccggaacaaacgttaaccaataccgaaacgcgacttaatgatatgaacccggccttttttgatgatgagtcgccaacgacttacttcaacgtgcgcggatataacgtgacacggtatacaaataatacggattagtgttgtggtcgaagtgcgtaggtttgggtggcgatggcgttaacgaaatcaacatcatgctcgataaataggagggttgggcgttgctcggcaattagagtttgaacttgttcacgcgtgatgacgtcgaggtaattcaacggttcatcccagaggtaacagtcagcctcttcacagagcgaacgtgccagtgcagctttacgtttttgtcccatgctcatcgtttctagacggtgggtaaataaatcgcggtcaaaacccagtttgcgtaacatgcttagcagttgttcgtgatcaacctgtttcgcagcagcgaagtcggccagtgagccgctcagttgatcgaaatcttgtggaagatacgagagggttaagtgcggattaaggtgcagactaccgctggcaatgtggtcagttgcgggtaatgcaagtaacgccttaatcagtgttgatttacctgcgccattaatcccagttagggcaacctgttgaccagcttctaaggtgaatgagagtggttgattaaggatgacgccgtcttgttgtaagacaagttcatcaacactaagcacattttgaccgggtttgaggggtcgctgattgatggtcagtggtgcagcaatttcaacgtttttaaaaagttgttgttttgcttcgattgcttcttccgcgcggttggcaattgtcgtcgcccgtttcataaccttagcggcgcgatgactgatgaagcctttatcgagattggcactttcagttttgacactggcggcgtttttccctttttcagcttcgtgggaccactgcgctttttgttgtgctgtttttgtcagccgtttgatatcgcccttgagttgttgattctgttgttgctcataagcagcttgttggtcgtgggcggtttgccaagtttggtagttgccttggtgaacagtgatgtcggcacgattaatcgctaggacatggtcgatcacttggtttaagaaatggcggtcatggctgacgacaatgaagccggctttttggcgtaaataattggcaacgacttggcggccttcttgatccaggtgattggttggttcgtcgatcagttgaaaatgatagtcgtcgatgaatagtaaggcgagtaacattttggtttgttcaccaggacttaacgaagcaaatggttgccagacgatttcgggtgcgacttgtaggagccgcagttcccgctcgacttgccagaaggttgaattgtcgaggttacctagctgcattagaatatcgcgtgtgagttgcgtaggttctgtaacagtctgtgggaaatattgaaaatcgagattggtaaccaactggccatcaaatggtagttggtgctgaagtaattttaataacgttgttttaccgcgaccattgcgcccgattaaaccgagtttccaactggcgtcgaattgaagcgtgacgtgatcgaacaacggttgtgtttgatctgaatagttaaatgtgagtgctttgaattgaattgtgcccatgaattatcacctcattgattgaatgagattggcccagttgtcgttaaaaatgcacaaaaaaagacgcaataacagcgtcttttaacaagtctttaggtaactgacctgaaaattaacgcaagcaatctctaacggcaatcggaaataaacggtccacgcacgtgcatgaacagttcgtaccaatcgagttgtcagaaaattagcatgcgattttcaatgccagtcacatcctttgaataagttaaatttgattctagcagattatttttagaaaaacaacttttaaaataatcctttacaaatagatggttatcccctatactaagtaactaattaataacaaggagggtctgtcatgaattcaatgcaacgtgttgcctttagctttttctttaagatacccagtaatcgactggttgattaaggagaaggcatttgagttgaaatgacaaaccttaatgaattggaagatggctgggtaaccccgagtcatcttcctggtggggctcactagtgaagactagtgggctcctttttttgttattaaatgagtgcgacgaagcctggttagatactgagtaatagcatagtccagtgaataaagctgggttgtagctttgtttactggacgtagctatacggaagtatctggctgaggagcacgttaagaaagaagtgcgacttgaacgatttggcttcgagcataacctaaaaagcgcaatggtgggcgtacgaccgccattgtgattctgtagttaagcgcagaaggcagttcaaggagcacgttaaagaagtgcgacgaagcctggtaggcggcgagtaatcgcctagtcgagtgcatacaataaaaataggagtggttaaaatgggattaatggcaaagatgttacgaaaagaatcactggaacgttatttacaacaagatcaacggttggccaaaacattaacggctaaggatttaattgcattgggcgtgggggcagtgattgggaccgggatttttatcttaccgggaacgattgcggcgttacatagtggcccggcaatcacgatttcatttatgattgcggcggtcgtttgtgccgttgcggcgatgtgttacgccgaattttcatcggcattaccagttgcgggaagtgcttactcatatggcaatattatttttggtgagttaatcggttggctgcttggctgggctttattcttggagtatatgttgtcagttgcggcagtttcaactggttggtcggcttattttgtatcgtttatcgaagggtttggcatccatattccgcatgcaattactggcccgtttgatccggcacacggcacttatgtgaacctgtttgcgatgctggtagtgggcttgattgcgacattattaatgcgagggactcgttcatcaacacgaattaataacatcatggttttgattaaattaggcgtagtgctacttttcattggtgtcgggattttctacgtgaaacctactaactggcaaccgttcatgccgtttggggtaagtgggattttcaaaggggcatcactcgtcttctttgcttaccttggctttgactgtgtgtcagcatcggcggcagaagttaagaatccacaaaaaaatcttcctatcgggattattgggacgttaatcatctgtacattgctttatatattagtggcgtttgtcctcacagggatggtgtcgtaccgcgaattggatgttgctaatccggtcacattcgcgctacaagtcgtccatcaaaattggtttgccggtctgatctcacttggcgcattagcagggatgttcacgatgatgttgacgatgacttacagcagttcccgcctcatctattcaatcggtcgtgatggcttattaccaaaagcacttggtaaagtgactgcaaaacatcaaaccccaactaacagtatcaaaattgtgacggtagtcatcatgattctaggcgggttcgtttcactggatcaattgactaatttggtaaacatcggcacattggtggcttttttctggatgtcgattggggtcatcccattgcggaagcgcaaggatattccgaataaaaatgggtttaaagtcccattttacccagttctaccgttaatatcaggagcgctatgtttattgatgatgtttgaattgccaaaagtcacttggattgcagcggcaatctggtttgtcatcggcttagtggtctactttacgtatgggattttcaatagttgcttaaataatgattaaatcagcctcaaaaagctgacgttcacccgcagaaacgctagaataaaacagaggtgacgactgtggtaaaacataaacggctgtggattggtctaataggaagtgtcatctgcgtcctcggtgtattagggacgtatttcgatgctggtttgtatcagcaaccgattattcgggtaacgcgggtccagacaattagccgtgagaaacagactaatgagtaccaaaatgaagatacagaagtagtccagcgggtcacgggccaatttttgaacactaagcaaaaagggcaagtgattacgctgcgcaatacgtatacggcgtcgcaagcgatgtcgacgcggtactataaaggacaacaagtctttttacaccgtgatcaatatttgaaaaagtggaccttaaacgagcctaagcgcgatacaatcatcgttggcttaacactgttgacgtttagtttcctattactaatgatgctcaagcgcggattgatgacgctaatcagtgtcttggtcaatctcgtcgcattcgtcttaacactccatttaaacgcgatgacgggtggacggtggttattgccgattatgtgtggcttagcggtcgttctaacgggtttaacgctacttttagtattaggacccaaccgccagatgcttgtctcatatggcgcgacaattggcgcaacgttcctagcactgtttctcagcatggccgtcttgaaattaaccggcgatcaaggcttgcattatgaaacgatggcctatgaattacagccgtataaaacggtcttcttagcggaagtcgtgctcgggattttaggcgctgtgatggatgagacgaccgatatttcatcgtcactccagcaattagcgattgaacggccaaacgttacgaagactgaattgtttaaatcaggactcgcaattggtcgcgaaattattggtccgttagttaatgtgttgttctttttagtcatggcggatgcttttccaattattttattgtatctacgcaatggcaacacaattgcgtataccttatcgcgaactgtcacgttaagttttacgcagacggtgattagtgcgattgggattactttggcggtgccagtaacgagcttgttggcaagccagttagtgcgggtgagacgcctatgatgttgctaacgggaattttactgatcttattagtgctggtttgtggttggcaagggctgacgattttcttcagccttggtttgaattttgtcgtgattatattggcactggtcttggtggcgggtgggtttaaaccgctgattgtgagtggtctgttgagtctgattctgttagcgacatccatcttcatgaataccaagcagccattaacggccaagacggcgtttgtgacgtcgttaatcgtggtggtgggcttgctgatcattattgtgcccctcagccagttagcagctacctacggctttggtgcggaagatgcagaagagattgaaggctttggactcgcaatcggcttgtcgttccaaaaaattagtatcatgatgatcattctgggcagcttaggggcaatcgccgaaacgagtattgcagttgccagtggtttagtcgaaatcttagaatacgacgcgcaaatgggctccaagcaactctttaaagcggggattgcgatcggtgaaaaaattattgcgacggcttttaacacactgttctttagttttttcggtagcttcttgtcattaacgatgtggttcattcaactcggttatccaattagtaaaattgtgaaccataaaattttaattggtgagggactcgcactattaatcggagtgattggggtcatagcaaccgttccgctgaccagttggctcctaaactatttcagaaaaccaaaagacgaataaagttaacttgaaaaataagtcaattcagattagaataatagaatatatgcacgaaaggaggaaacgcgcaatgtcacaaaacttacatgttagtgtttctggtaaccgtcgtcctgttaaccaaaacaatgctaaaaaacgtaacgctgaaacagctgctgtattgaacttcttgaaggaacgtaaatcagctaaataattataatgaatttttttcaaaataatgttaaaagaccatctaaaagtcgcttgaaaagcagcctttggatggtcttttaatatggaaaataaatatattttaaactaagtttaaccacaaaaaaagagctacatcctaagatgtggctctttttaaatacatatttttgattaaaggacgcgaactgcgaatgaaggcatgaagtagcttgagatacttgctgtcttaactgattcgccaggttgtggtgcgtggacgtatttgccaccaccgatgtagattgcgtcgtggtatgaagcaccagcgccaccccagaagaggatatcgccaggttgtaagttatcaagtgagacgcgttggccagcacgttcttgagcagttgtgacacggcccaatgaaacgccagcttgtgcgtatgcgtattgcactaaaccagaacagtcaagaccaacaccaggtgttgagcctccccatacgtaaggtgtaccaatttgtgataaagcagcgttgataacagtttgtgcgttaccacttgcttttgtcgttgtattcgtttgtggtgcttgttgagttgttgcagcttgagttgtttgttggctgctttgagttgtcgttgtttgtgtttgagcaggttgtgttgttgctgctggtgtacttgttgtagcagcaggggttgttgcttcagttgttgcagcaggcgctggtgtttctgtagcaggtgccggcgttgttgcttgaggagcagttggtgcttgaacttcagttgtagtggttgttgcagcaactggtgtcactgcaggtgcatttgtaattggtgtgacaccatccaagttagggttgtttaaaacaacgtagctagcaggaatccaacctttgctttctaattggtaccaagttgtgccgtttaaatctttttgatcaatgacgtttttagttgtgccatatgttaagtattcgccagttggttgagcagcagttgtgtcagcccaaacagttgttgcacctgattggaagttagctgttactgtgttcttaacagcggttgttgttgcagctggttgagcagttgcatcgccggctgtaatgaattggcttgaaacccattcgtcattaccaagtttgtaccatgtttggccgtaaacttgttttgtgtcttggattgttacttgttggttagttgccaagtaacgagcaggtttttgacctactgctgggctagtccaaacggttgttgccccgtcagcgtagttaaccgtaccatttgttgcagcttgggcatcatttgtttgaagacccatcaatactaagccggcaaggccaaccattccagaagataagtaagtcattttttgttttttcatgtgtttgttgtgctccttcgaaaaatttttttaagttgtttgaattttgaattaatttagtacgctgattagcatagcatctgaaagtaacaaacatgttacataatagttagcgcgctgttacatgtttcttaagatatcggcgattaaaagactaaacgtaagcgaacgtcaaaaaagtacgcatatcaagaagatagcgtactttttaggaagtgtcttaagattattggagtgtaccggtttgtgtctgatctgtaccggtctgagtattactttgtgtaccagtcgtcccggttccggttgtggtatccgttgtcgaagtccccgtcccagttccagttgttgcaccagtgccattccccgttgccgtgttagcagcatagcctgtcgtagtttgtgtattggtagctgtgttttggttagttgttgcttgattagcggttgttgtgttttgcgtggttgccgcttgggtattgttagagtaagtgttgtattgattttcagcgttcttaacatacgccaagtacttttctttaaagccgtcatgggttgatttattaatcaaagctcggacgtaagggaagtcgctagcagataggttagctggaatatgcttgaggttgtcgtctgtaaataagttccggacagctgccatagccgctaattgatttttagcttcttgataatcagcaagttgtttggggtggtcggtatagtccgtttcttcaccaagttgtgcatcggctttgacaatcccatctttatcgaaaaaggcgcttgttttaactttgttctttttcttctttttagcaggcttttcagaagcaacactttcagattcactagttgctggttgcttaccagtaatcttatctagatcttcttgggcagccttgtaatcagcctttgcatcagcgctaattccgctcatataaaggttgggcgtgatttgtttgtcgagtttgtcagccgcagtgataatttggtgttgtttattggctgttaacttcgcaggatctttacgggaaccatcactatagagttggttcactttttggacgtattgatcaattttttcttctgttttagttgcggcagctggaatttctgttttattctgacagccagctagaatcatgaaacagctggtcatggtcagcaacagagcaagtgttaattttttcattgagaaaccaccttgttgttagttattcatctaataatatatcatgaaattaggagcgctaacatggtcgtttgacgataattccgaaatcggaaattaacgtgaaatccaatattgtatagaaatcgcaataaatgcgggggttaaaggaaattaatcaacaaatcaggctatactttcgcaagtgagaagcgtacactatggatattaattatgagaaaattttaatcaaacgtgaccgatgagttcaattaaagtggtcatcagagggagtgcaacttatggaatcagcatgtacatcaattttagttggtaaaaacgcatcattggacggatcaacgatgattgcgcgtaacgacgatacttttttacctttaacaccacaacggtttcacatcaatccagctgttaaagggcgtaagggtgctaaaattaaatcttggttaaacgggtttgaagccgaattacctgagaatggctaccgatggcccgctgttccgaatgttgattacaaacataatggttattatgatgaaagtagtattaacgaagttaacgtggcgatgagctgtaccgaaagtacatatggaaatgaaaaagccctcgcttatgatccattggtgaaagacgggttggatgaagattgcatgcaagctatggttgcgccgtacattaactcggcgcgcgaaggggtcagctatctcggtaatttgattaaacaatacggctcacccgccggcaatagtgtgctctttagtgatcacaatgaagtgtggtatatggaaattgtgacagggcatttatggctagcacaacggattccagatgatgcttatgcagttgccgccaaccaagtggcgattcaacaagttgatttcacggatgccgacaattttatgtgggcagaaggcattcaagaatacgttgaagcccatcatttgaatccggataaaacgggctggaatttccgccacatttttggcacgatgaatgaaaaagaccggcactataatacaccacgggtttggtacgcccatcatttatttgatgctgattttgatatgtcacccgaatcggctgaattaccatttattcggcgtattgaacataaaattagtgttgaagatattgaaatgttgttaggctcacattataatgaaacgccattcgatccaatggggcatgggactgatgccgacaagtatcgttaccgcccaatcggtttgaatcggacgcaaaatgcacatattttacaattacggaatgatgtgccaaaggaacaagcggccatcatgtggatcacaatggggatgccaacgtatacaccgttcattccatttttcacgaatgcgaacgatacggatctaagtttcagcgaaacaccaatgaaatgggatatgaagagtgcatattggttataccggacaatttcagtattggtggaaggccattatagccagcacattcaaggcaatgtagattacttaaaccgttgtaagcaagaattgcgaacgatgattgaagccattcaagtggaagcacaaaagtatcaaggcgctgccttaacggagtatttgactgagcaaaaccatgcgattgttaagcagatggcgactgaagcgacctcgatgattggggaactcgttatgtcgggcattaatttatcgaaattgacgttcaatatggatcgtaacctataagatgttattaaaagaagttattaaggatgaaaataattttatctttaatgacttctttttatatagtcacgacaaactaatatagtgggttgatgattatatggtcaattgaattgttgcacatcaaatctatttatagctatttaatgaatcgagtggtttcttttctctcaaaatatgctaatatattgatagcaaaataaattaaatccgttaattgtttctacgcatgacagatcggttagtaaagggagaaaaggttatgacagcaaaagcaacaagcaagtattctgatgattgggaagtagtaacgcatctttcattgatttatcggtggattgtcagcaatttaagcgactttgtcagtggagaaagtttaaattacaaagtttcttttgaccaatttttaattatgtacgaaatttcaactaacgaaaacttaacaggtagtaagttagctaagacgatgagtgttagtcgttcagcaatttcacgccaatgtcggttactgaaagaaaatgggtacgtggttgaagaacatcttcaaacagatcaacgggttaaatttttgagcttaactaaacaaggtcaagacgttttagaccggttggtgagccgctatgttgaaaaataccgtgaaatcgaagcacaaatgggccgtgataaagtcgatggtttgattcgattcattgatcaattctatttagatgtcattgaaccaagtgaataccaagataacaagatgggccgttcattcctaaataaagtaaagaaaatgaacgaagaaagtgcagaatagttattatgaaataggaagaaccgcgtgggggcggttctttttttatggataaaacgtgctttttggttgcaacaacttccgcttaatctaaactagcacttaatcttaaaatcgagattaagcgctagtttgtattaatgctcagttgctgaccgcaaccaaatgcattcttgccttaaacgtgctttcatcaataacttcctgtgctttgctacacttatcaaatcggcgattgcatcgccaattcgctaagttagataaatgctcagaagttacccgttgatgacgcactctgatataatagggcttgtttctttttatgaaattgcttacaattaagccatgaacggattatgaaagagtgggagtcgatatcatggaaaaaattctggctattaatgcaggtagttcaacactgaagtggcaattatttgaaatgccgtctgaacgagtaatcgctaaaggaatgattgaccggttaggcttatctgattctgtattcacagtgaagtatggcaatcaggaaaagtttaaacaagtccaagatattacgacgcacgaacaagcagcaacgttattattaacgcggttgaaggaattaaatatcgtaacccatctcgatgagattacgggggttggtcaccgggtggttgctggtggagaagccttcaaggactctgcagtaattaatccggtcgggcttgatgagattaatcgtttggctgaatatgcaccattgcataatccaacccaagcttattacattaaaattttcactgcattattgccaggcgtaccggaagtggctgtttttgacacgtcattttacagtacgttacctgccgaaaactatttatacagtattccgcaagcgtattatgaaaagtatggggcccgtaaatacggtgcgcatgggaccagtcatcggtttgttgctcatcgagcggctgaaatgctagatcagtcgcttgaaacgcaaaaaatgatcacgttgcacttgggcagtggtgcatcaattaccgcgattcaagacgggcacgctgtcgatacatcaatggggttcacaccacttgcggggattacgatgggcacgcgatctggtgatattgatgtctcattagtagcctttttagctgaaaaattaggtaagacaatgccagagatgatcacaattttgaaccataagtctggcttattagggatttctgaactatcaccggatatgcgtgatttagaagaaaccgctgactcacgaccacaatcccaattggcgcttgatatttttgtcaatcgagttgtgaagtatgtcggttcttacgtagctttaatgaatggagtagatacgctggtctttactgccggtagtggtgagaacggcagtgaattacgggctgccatttgtgaacaactcgcttgttttggtgtagaattggatgaagataaaaataatgtccgcagccaagaacgcattatcagcagtgatcaatcacgcgttaaggtcctgattgtgccaactaatgaagagttgatgattgccagagatgttatgcggttaaaataagggagttatgcaccatgccacaaaaaccactatcagaatatgaagttgagattccccgattgagtgctcgattagaagatacaccagccacaaaaacctttttcgacgcactaacaccaggctatcaacgcgaatgggcacgttatgtttacggcgctaaagctgaagaaacacagcaacgacattatgttgaaatgtgtcaaattttagatgcaggttataaatctaaacgaggatacggacaagcaaagaaaaaataaattaaaaaaagattaatcaggccaaatgcgcgccagattaatcttttttgtgttctttaataaagcggttacaaaaaagagttgaattctcaaagaagctcctttataataatcaccatgatagttagtaaaacgttttactagcctagaataaaggacggaggattgaatatgaatgctgtcaatatcttaattggattaatgccgatgattggttggggattgttccctgtgatcgttggtaaaattggtgggaaaccagcgagtcaaattattggaacgacacttgggacattaattctggccattattgtggctattttccgcgggacaccgattccagaaaccaaaacatttattttttgtttaatttcaggggcttgttgggcattagcgcagattatcacctttcatgtttttgaaaccatgggtgtttctagaacgatgccaatcacaactgggttccaacttgttggggcatctttgtggggcgtcttcatcttgggtaactgggcaagtacacaatcgaagttgattgggttcacagcgattattctaattatccttggtgtttatttaacagcctggagtgaagatcgttcaagcgctagtaaaaatggcgcggtgcgtggcatcttgttattattagttggcgaactaggctacctagggtactccgcctttccacaagcagtacacgcggacggtttccaaggctttttgccacaagcattaggaatggcaattgtaggtgttatcttcggattaacccaaaccagcaagacttatcaacctttcaaagaagcaacttcgtataagaatatcttcagtgggttcttcttcgcgtttgcagcgctgacgtatcttatctcagcacaaccttctgtgaatggcttagcaacggggtttgttttatcccaaaccagtgtcattttcgccacaatcggtgggatttatgtgttgaaagaacaaaagaccaaaaaagaaatggttgccgtattaattggtttagtactcgtattagtggctggatctgtgacagcctttatcaaataaaaagtggggcggatttattatgcgaaaaacacaagttatcaattcacaaatttcaaatgtgatttcaaacatggggcattttgatacaatgagtattggcgatgctgggatgccggtcccagctggaacgcaaaaaatcgatgtggccatcgaaaatggtgtaccaagttttattcaagtacttaaaaatgttctaacagaattggaaattcaaaaagtttacttagcaaacgaaattaaaacagctaatccagcacaacttgaacaaatcaaaaaagtgattggtgagacgcccattgaatttattgatcacgcacaaatgaaacaggacttggggcaggccaaagcatttgttcggacgggtgaaatgacaccttattccaacattattttagaaagtggcgttgtattttaaccattaggagggctttcaaatgaaaaaagtaatcgtattagggtcaacaaatgtcgacacaattttaaacgttcagcgttttccacaaccaggtgaaacattagcaatggatggccgcgcagttgctggtggtggtaagggtgcaaaccaagcaatcgcagctgttcggtcaggtgcgcaaacagctttcattagtaaggttggtaaggaaggcgccgctgatttcatgctagatacgttcaaaaaagatggcatgaacattgatcacgttcgttgttctgaaacagctgggactggccaagcttacatcatggtggatgctagtggacaaaatagtattttaatctatggtggggccaaccaagatgtgacagtcgatgatattcatgaagccgaagaagccatcaaagatgctgacagaattgtcgctcaattcgaagtacctattcctgcaattattgaagctttcaaaattgcccgttcaaacggcgttcaaacgattttgaaccctgcaccagcgattaaaaatattccagctgaattattggcagtgacggacatgattgtccctaatgaaacggaagctgaaattatcacagggattaaagtgactgacgaagcatcaatgaaagctaacgtggaagcgatgtttaagatggggattaaagtcgttatcattacggttggggcaaagggctcattctatgcaacaccaacaacaaccgggtttgtaccggcatttaaagttcaagcagtcgatacaaccgctgctggtgatacctttatcggtgctttaagtacgaaacttgaattggattacagtaacattgaagcagcaatgacttatgccaataaggcttcttcgattgcagtccaaactaaaggggcgcaaaattcgattccttatgaaaaggatattcagttataatcatattaacagcgtccatggctagccggctgtgggtgtttttattaatttgattcgggggagtgccaaaatggttcgaaaagtaacgattaaagatgttgccgcgctggcgcaaacatcggtcacaacagtttcgttaattcttaataataaaggtgagcgctttagcgcagaaacgattgcgcgggtcaaagccgctcgggaaagacttcagtatgaacctgattatttcgcgcaaaatatgattaataaagaaacgaagacgatcgcggtattggtgccggatatcaataatcctttttttagtcagtttattcaaggtgtcgaagaaattgcctatcaattcgatttcatcccattaatttatagtgcaggggcgcataatcagaaagttgatcattatttaaaggaattggttcgtcgaaatgttgacggctttattttggctgtccctcatttacaaaaaacaacgttggatagctatctgcaaaaacgacaaatcccgtttatcttattagatcaatcagataaacaacatgcgggagatgaaattacggttgccgatacgcaaggtggagagttggccgcacggtatctcattgaacgaggccatcataaagtcggaattgttttaccagaacaacgagcttggaacatcgaacaacgattcattggttatcaagccgcgatgttgaaagcccaattaccagtggcggatgagtggcaaataacgacaccgttaacgaaattaggtggttaccaagttgcacgacaggtgattgatagcggggtaactgctgtatttgcaatcaatgatgaactcgctatcggattgattcgtgggttacgtgaattacgagtacaggtgccagaagatatctcagtgattggctatgataacatcgattggtgtgaatatgtcacaccaaaattgacgaccattaagcaaccgattttcgagcttgggcaagaagcaacacgtctattattgaaccggattgtggagcctgctattgcgccacaacaaaaagtactttcaattgaattagttgaaagagagagtgtacaacctatacatccctaaatccataaaagcgtgatccgcatgaagccttgttatcaggcaacttatgcggatcatgtttttttatttgtctaaaaatgaaaaaaaggcttgtaaatatgtcggaaagaactagacttaataagtcttaaagacctgtctaaaagactgattaaagagagaggttatgcgtttatgtatgaattgctgatgttatccgccttaatgagccggaatatgtcgggctataagttgcggattatcttggaaaatgcgatggtgcccagacggaaaatttcaaatggggttttgtatccgttgttagataaattggaaagcaaaggctgcattgggtttgaggaagctgatcaggattcacgtggtacgaagattgcgcacattactgaagagggacggcgctattttgctgaattaatggctaaaccagtcgttcatgatgcgaagtgggatgatgcttatcgctttaagatgcgtgggatgcactacattgatgcagcagaacaagtcagtattttacaagatttctacagtgagttggctgaagatttacatgtttatagcggtgtggaaaaacatctaactgaattaaaagatgcggatgagacaatgacggattattattattggcagattcgttcaaccgatttcgtaatcacaacgatcaaagccaaaatggattggctacaagcacaaataaatgagatagagaaaatggagatagtaaaatgaaaaaaacaaccaaccgctggatagcgctggtcgcgatgagtctgggtgtctttatgggattgctagacgtaactgtcgtcaatgtcgctttaccaagtatggcgattgattttaaaacaacttttagcaacttacaatgggttttgaacgcttatacgttgatgtacgcggtcagcttgttgattgtttccaaattaggggacatgttcgggcgcaagaaaatttttatcatgagtatgattttattcacagcggcctctgtcgttaatggactggcaccaaatttattggtattagatatcgggcgcgcggtccaagcgattggtggctcgggtatgatgagtttatcgatggcactagtggcgtcgaactttgaagggcgtgaacgggggactgcactggggattttaggctccgtgattggtttttcaactgctattggacccttagtagggggctttttagtcgaaaacttcggctggccatccatctttttcgtcaatttaccagtcgggattatttcagtttacttagtgattcgcaatgttaaagaaacaccagcttatggcgcgggcgaatcaatcgattttatggggatgatcttgtcagcaattggtttattctccgggatttatgggttgattcaaaaagaacaacatatgcactgggattggacagatatgcgcattatggggtggttagttgcttccgttttaattttagcgcttttcgtctttgtggaattgaaagcaaaagcaccaatgatgaacttgacgttacttacgaatcgccatttcgtgggtgttgtgattttagctttctcattaggcgctggtatttttgccttagccgcttatcaaacgagtttgatgcaaaattacatgggttactcagccttttcaaccggtgtgcatcaactgccaatgagtttatggtcccttgttttaggaccattcacgggtgttctaggctataaattcggtaaaaaatggttgattgcttttggatttactgtttctgcccttggtttattaatttttagacaagtgacaacgactgattttacttatatgcaattattaccattgcttgcgctaactgggttaggcaatgcgattatcaatccaatgatcaatacagcggcgatggataatattaatcctcaagaaatcggaatggcatccggtttattgaatgttttccgccaaattggaattaccgtcggtgttgtgattctcggtttatcacaaacgaatgcctacgaaacgagtttgaagactggctttagtggtagctcaatcccgaaggcggcagcaactggcattcagcaagcattggttgaagcaggtgctttttcaggacatgcaatcgcgtgggggcaacaattagtgaagacaccgtatgccgcaaaggtccaacaaattgttgtcacggcttttgataaagggatgatcgctgttgtaacgacgtcgctagtgctcatggtgattgccatcttggcggcgcttttcttattgaaagaaacgaaaacgactgatcgagcataaaaaaagaaggttcattattttctgaaaagataagactgtaaattgtgtagcaaacagtgtaaaatgaacagagtaaaaataaaaaaagtgaggttacttacacatggctaaattagtttttattcgtcacggacaaagtgaatggaacttatcaaaccaattcactggttgggttgatgttaacttaagcgaagaaggcgtacgccaagctcaaaacgctggtgctttattgaaaaaagaaggcatcctttttgaccaagcttacacatcagtattgactcgtgccatcaagacattacactatgcacttgaaggttcagatcaattatgggttccagaaatgaaatcatggcgcttaaacgaacgtcattatggtgcattacaaggccaaaacaaagctgaagcagctgaaaaatggggcgacgaacaagttcacatctggcgtcgttcatacgacacacttcctccactattggatgcaagtgatgaaggttcagcagcaaacgaccgtcgttacgcacacttagatccaaaagcaattcctggtggcgaaaacttgaaggttactttggaacgtgttatcccattctgggaagacgaaatcgctccaaaattaatcgacggccaaaatatcattgtagccgctcacggtaactcactacgcgccttaacaaaatacatcgaaaacatctctgatgaagacatcatggacgttgaaatggcaacaggcgaaccagttgtttatgatttagacgaaaacttaaacgtagtaagcaagaagaaattaaactaattattaaagagtgtgtttaaagcgggttgattctgagcattagcctaaattcgtgaataatcgacgttagtcgattgtttgcggattgtagctaagcgcaggagtcagctttaaaaagcatgtttaataagcttacacaaataggctagtccctcaagggatagcctattttttttgcttaaaaatgacacgttagggcgctactagggcacttcagctaaatttgatagctaacggtaatttaaaacattttgttgacaagcaactaaaacgatgataatctttattttgttgacaagcaactaaacgaaactaaagaaggtttttttaaatgagtacattattagtaatccaagcacatccccatgttgaaaagagtttatccctagcggtagggacccgctttgtagaaacttatcgtcggacccatcctgatgatcaaattattattcgagatctatatactgaagcaggtgttccaccattgaacgatatgacaatggctgcatggcgtaaacaaaaatttgacgaaccaatggctgaagctgagaaaacactattacaacaacacgcagattggttagatgaatttatcgaagctgataaatatgtcttcatcaatccaatgtacaatcattttttaccagctgagatgaaacaatatttagatttgacggcggtcgcccacaaaacattcaaatacacaccgaacggttcagtaggtttgttagaaggtaagaaagcaatccatatccaagcagctggcagtgtttatcacgctgggggcaagtgggggatcgttaagttcttgttccgccgtttatttaagattaagagtaacgaaagttctgcacttatggatttaggcgatatgtatttaaccaatatgttgaaattctatggtgttaatcaagttgaacacgtctatattgaaggcgcggatgctcatgcagatcaacgtgaacaaatattagcacgggccctaacggaagcgacgaccaaagctaaagtattctaatttggtgtatactggtggtaacaattgatgagaggttaagcaaatggaaaacgaatcagtgatggcactctatcatgcaatcaagcaattacgctcagatagtgtcaacggccgcggtgttcaagaacaaaaatggttgcaaaatcagctgagtgatgagaacttgaaaacgatgattccgcagctatcaatcattgcattgcacatattatcaggattagaggccgaagaattaacaggtgtagcactagcggatcggttggcggttacgcgtggcggcattacacgcgccgctaagaagttgattcaaatgggcttaattcaagcgactaaaaaaccagatgatcagaaaaaaatctattattctttgaccgctaaaggccgtgtgattgcgcaaagccacgataaaatgcatgaaacgctgaaagcgcaagttattgataaggtgaccgaaaaatataaagatgctgaattgaagcaagcagcgtctttaatcaatgatttaatgcaatttgaacgcgatttttattgatgatattcaaataggctagtccctcaagggctagcctatttttttgtattaagttatcgacggtattttcgatttgctttattgttgcgatgatatagatacaaaagaaatgccagtaatactgtgaccagaatcctcatagccaaaataacatagaacgcaacttctcttccagcgtgaatttgccaaattggcgagaataacaaaaataaaaactgtacttcactaatccaggctgtaacaacactaatttgagtaatcttggttttgaacccgattaaaaaaataaataatgaaagcaagtaaagcaacacagtgacaaatgtagtcgtatctcgagcaaatattgcaagaatttcaaaagttactttagcaccaaagataataaagaaagctgaaaagacacagagacccacgatactaataataactcgacgcagtaccagtaaacgaccttggtgttagatctttgaatagaccattaaacataataagaacctccaaataaaaatcgcgcgttttataatcaagttagccaaatacttttagctaattgataaaataaaaaacaccaagacaaatctctgttatcattgatgttcctacacaaacaatgaaagaggttattgtcttgatgcaagaacagaataccacagtcagaaaaaaaggtcagcacctaacttcgtttgaacgaggcagaattgctacgctgcacagccaaggctattccaatcgtgcaattgccagagcgcttaatgtttgtcatcaaacaatcaataatgaattgtgccgcggcgagatcgaccaagtaaaaaaagtgaatggtcaacgccaatattacgctgtatactcaccagaaacagcacaagctaagtacgaagctaatcgagcccactgtcatcgacctttgaaactcggaggattcggcacatcttggttacctggtggtgatggctttcttggtgaatgtaatcaaagatattggttacttctgcgcaaggaagcccagggctttttttaggatttcgttctcctcagacagcgaagccagtcgcttttccatcgctttgatttcgtctggcgatttaccggattgagttttggcctggccctggatccacttatgaactgttgaatagccaatgccatattctctggccagttgggcagctgattcgccttgcttatataggttgataatgttttgtttgaattctttgtcgtaacgagttggcatgtaaaaattccttccttttgagagatgatttattcattataccctctcttaaaagttgtctcaggaatcagcttacatccagatggtcgtgatgccgattcagtcaactatgagctggccaagatctgtcaagaatacggatcaatcatgaagtcagttactgccgataatggcgctgagttctcggaagttggcgctgtacttaccggtgtcgctgacctttattatgcccatccatatcgttcctctgagcgcgggactaacgaagcgcataatcgaatgatccgccgcgatgtacccaagggtctatccatggatattttgggtcctcatgatatccaagcagttgagtcaaagctaaacaatttaccgcgccggcaaactggctatcaaacacccaaagagcttttctccgctgcttccgccggttaagttaagtccataaaatatgaatattaatgaaaatactgatttaataggatttatcgtgtggctaatttgttcttgcaatttgggagtcgaaaacaaatggatttcattcaagattaaaatgagttatattgtctttaaatataataaggattggtgatgatcatgaagattgttgtgattggctccgttgcagcggggacgagtgtggcagcaaaggcgcggcgaaatagtgaagttgatgagattgtcgtttatgaaaaaggtcaggatatttcttattcggtttgtggcatgccttattacgtagggggtgaggttgaagacctagagacgttaattccgcgcgatgcggcgtggttcaaaaaacgcttcaacgttgacattatgacgggtatcgaagtgatttcaatcgatgaaaaccaacaagcgctggtcttgaaaaactttgagacgggcgagttgtttgaagattattatgaccgcctagttttagcgacgggggccacgccacgcattattgcaccgttcgatgaagcctaccaaaacgtcttcacgatgcataacatggtagatacacgcgcaatcgacgcgtatttacagcaccattcagttcaaaatgtgacgatttttgggaccggttatgttgggcttgaattgatggaacaatttcaaaaacgtggcttggacgtgacgttagttcaacgaagcgcgcaaattatgacccattttgatggtgatatggcctatcgtgctgaacaagttattcgtgctaacggggtgcatgtgttaaagagtgtaaccgcaaaacaagtgactgcgcaggatggtgtggtatcggcggtagaattgagtaatcagacgaccattcaaacggatttggtcctactagcacttggcgttgaaccacaaacgcagttggtcgaccatatgaagatagctaagggaccttcaggggcgttgaaggtcgaccaacaaatgttgacgactgtaccgaatatttacgcggtcggcgatgttgttgagagtttctccgtaattgatggctcaccactgtatcgaccaatgggttcgactgccaataaaatgggacgaattgccggcaattcattgactggcggtggcttaacgcaccgcgggattcttggaacggggattgttcggttgttcgatacaacgattgcacagactgggtttactgaagcagtcgcgcgagctaaggactatgatgtggaagtactctacaacattaaaccagggcatgcagattacttaaatggaaccgaaaacgtcattaaagccattgctggccgtcaaacgggaaaattattaggtgtacaaatcattggtaaagatggggttgataagcggattgacgttttcgtgactgccatcacattgggtgcgaaggtggccgatttattccatctcgatctagcttatcaaccactctatgcaaccactaaggatccagtgctctatacgggaatggcgctcgataatgcattgcatgggcggccgctcttgcctccagctgaattggagcaacgcttggctgaaggtgaacgcttccagattttggacgtacgttcgaagcaaaaatatgcggacgagcatgttgaacatgccattaacatgccgcttgctgaaattcgtgatcggttcacggaattagatatggatattccaactgtcacctattgcaataaaggggttacggctaatgctgctcagaatttacttctgaacctcggttttaaatccgtgtataacttgagtgggggcttcaaaaattatcaggtagtcaaagcctacttgaatgataaataatataaaaataccgctgacaattcgctgtcagtggtatttttttgcgttgttatagatttttggtgaaaaattgagttaattctgaaaaaggaataagcgcgatacgatcatataaatcgacatgcccagctgcttttacggttaataactgttttgattcgttagcactggcaaaggcggcttcactgaaatgtcgtgaccatgcctcttcaccaacaacaaagagcatggcacgttctgtgatcgtttcgaggtcgcgcaatggatagaaatctaatagtttagtaaaagttgtacgagtgggatggagtgtcgagttggctgcgccacgttgggtacgataaaagtcgtagaattcacgttcgatatcagttgagttttcgtccagttcttcaggtactccatgggcgtaagtggttgcttgacctgcaatctctaatgtccgggatcgtgaggattcctcgattaatgcgttgccgcctagtgcatcacgctgttcgcgaacaatggcacccatatcggttaagttaatagttgcaagtgctttaatacgtgcgtctattttgagtgcgttgagcgcgaaaccaccggccgaaccaattgcgattaagccaatacggtcattggcgacacagtctagagtggttaggtagtcagtggctgctgagaaattctccgcatataagataggggcaatcgcgttgcgcagagcaccgttactcccgccccaagcagattgatcaaatgaaacggttacaaacccttgttcagcgagcttaatggcatataggttagctgcctgttctttaacggcaccgatgggagcaccgatgattagtgctggaaaaacagtttccgtcgagtctttgggaagaaagacgttagcagttacttgcatttcatagatattcttaaaagtgacgggatgctgttcaacggctgaactttgaaaccagttattggcgtcgtggtggacatcgccagttggtaaatccggattacgacggcgtgcattaattttaccggctgaatacgacggttgtctagatggcatgctactcctcctataaaaataatttcttatccttattataaaatataagaatgtgaaatactactttatattattaatttgtaaacgattaatttgatgtctgctagtgatgattgtaatagtcgataatggtcagatggttggcattttatagtgaaaataaaaaattaattaattatttggagagttgtccgagcggccgaaggagcatgattggaaatcatgtaaatgggtctaacctgtttcgagggttcgaatccctcactctccgttaaataataaatgacatggcccgttggtcaagtggttaagacaccgccctttcacggcggtatcatgggttcaaatcccgtacgggtcatttttttggaggtttagctcagttgggagagcgtctgccttacaagcagagggtcacaggttcgagccctgtaacctccattcggtcgcatggtctagctggttaggacgcctgcctgtcacgcaggagatcacgggttcgagtcccgttgtgaccgtcttaaaaaaagcgtaagcaatttattgcttacgcttttttgttgtttaatcattttaattaaagacgccagtgattaatagcaagtatccaaactcttgtaaatagcagttacgtttgattaggccgagttgtaacgcaattaataataactggccacctgcaaagagaattaaatgccaaccgtgaattaaatgcgttaaaatcactgcaataataatgcacgcccatactacataactgaggatagtaatcatccgattgtgagtcgttagttcgagaagataaatgatgattaagaataggcctaattttacgagtaaatcctcggggataaagtgaatgccactgaaaatctgagtaattaaaaagaaaaatggggctagtaagaattgaaatgataaccgtaacgtacggtctttgaactggtctgggtagataaaagggattagaacaaaaatgctagtaatccctgatagaagcccaatcaaaggtagatcacgccagccgatgattgcggctagaataattgcgactaaaagggcagcagttgcaattattcgctttggtttataccggggtgataagacgagtaaaatggctaatagcgcccctagaatcgcagttagataaaatgaaagcccgaattgctttggaaaagaccacattgtcagcccgacgattaaaccgagatttaaataattaaacaaagtcagtaattgtggccgagttgaagcctttagatgttgttggttaaggtagaacaatagcaacacttctttcttagaatatgtgtctcatcttaactttttttgaaaagaaggtcaacggcttttgaaatggattgtattttgtgctaggatagtagagttataagaagttcccgataggattcacacaccgtgaagaggccttgtaaccgacacatatatagggggaaacatagaaatgcaagaaagacatttatttacttcggaatccgtttctgaaggccatccagataagattgcggatcaaattagtgatgccatcttagatgcgatgttagcacaagatccacaagcacgagttgcttgtgaaacaaccgttacaactgggttagtcctagttgtcggcgaaatttcaacaacggcatacgttgatatccaaaaagtggtcagagagactattaaagggattggttatcgtgatgggcattatggctttgatggcgataactgtgctgtgattgttgcacttgatgaacaatcacctgatattgcacaaggggtcgacgattcagttgaatctcgtgcaaaggatgaagatccacttgataagattggtgcgggggatcaagggttaatgtttgggtttgctgtcgatcagacaccagaactaatgccgttaccaattgccctttcacaccgtttaatgcgcaaagtcgctgagttaagaaagagcgggcaactcgcttatctaagaccagatgctaaggcgcaagtcactgttgaatacgacgaaaacgaacaacctgttcgtgtcgataccgtcgttatcagtacccaacacgatgcagatgtgactttagaaaccattcaaaaggatatgcttgaacaagcgattcaaaccgttattccagccaaatacttggatgatcaaaccaagtatttcattaatccaactggtcggtttgtcatcggtggaccacaaggcgattcaggtttaactggtcgtaagatcattgttgatacttacggcggttatgcacgtcatggtggcggtgctttctcagggaaagatgctactaaggttgaccgttcagcaagttatgcagctcgttacattgctaaaaacattgtagcggctgggttagcgcgcaagtgtgaagtgcaattggcctatgcaattggtgtagcgcaacccgtttctgtttcaataaatactttcgaaacagggaccgtcagtgaagaaaagattcaaactgcaattcgtgaaaactttgatttacgaccagcagggattattcaaatgttagatctacaaagacctatatacaagcaaacagctgcatatgggcactttgggcgtacagatgtcgaatttccatgggaacgtttagataaagtggatgccttaaaggcaagtattgctaaactaaatgcctaatgtattattagacgagtaaaagaggcggcctttccttagcttatttgagttaagaaaaggctctttttatgcccaagaataagagagggagctaagaatggaacaaagtaagggaagaaaaacgaatgtattactcgtgacgattgcgattttcgtcgcaactttcatgacagccattgaagggacgattgtttcaacggcaatgccaaccatcattagtaatttacacggtatgaaattgatgaactgggtcttttcaatctacctattaacgaatgcgatgatgacgccaatctatggtaagatggcagatcggattgggcgtaaaccaatcttcatctttggtttggccttgtttgtcatcggatcatccttatgtggattgtcaaatcatatggggacgttaattatttcccgggcaattcaaggcttgggagccggggcgattatgccggtatcatttacgattattgctgatatttatccgattgaaaaacgggcgaaagtcttgggttttaatgggtcagcatgggggattgcctccatcattgcgccgcttttagggggcttcattgttgataagttgacctggcattggattttcttcatcaatgtaccgattgggattattacgattggtttaatctggtacttccttcaagaagagaagaagacgagtgctgaaccagtcgactattggggcagtttatggttgatggcggcccttttgagtttactatatggcttccaagtcatgggtgaagccaaaccgtcagtgctcgttttagggtcaatgctcgtgattgcagtggttgctttttacctctttatccgcgttgaaaaacatgcacaagatccgattatctcattatcattatttaaaaatcgaacatttgttgtccaaaatgcagtggctgctttagtgagtggtttcttaattggttttgaagtctatatgccaatgtggatgcaagggatcctcggattgaaagcctcgatggggggctttgttgtgacgcctagttctgtgatgtggatttttgcctcattatgggcaggcctattacttgttaagcacgcaccacgaacaattctagccggtagtttgtgtattttacttgttgggagcttcatcttagcattggtcccacaaaccacaccgttttggttcttcttattagttgctgctggtttagggattggctttggcttaatcattaccacgacgactgttacggcacaaagcgttgctggtgctgacaaagttggtgttgcaacgtcgtttaatacgttaagtcgaactttaggtcaaaccttgatggtttcagtttatgggattattttgaatcggcaattggcaaaagggattgctggtgatggtcgattagatcaaaacatgttaaatgaattgattaatccagaaactgctttgaacttacctaaacaattattaccaacattacgccatattctatacaatggtttacacttcatttattttgcgtcaattgtgttaattgccattgcaattattattaatttaatggatcgtaaaagaagtaaataaaaaagattgaccaatacggtcaatcttttttattttaatggaataagacacagacgccttcaggtgtttctaagtctttttgacaggcggttaataaaccagtttgggcatcgcgccgataaagcgtaccattatcactattttggttaacggctaatagaaaatcgtcgttagcggaaagattgaagtcacgggggaattcaccatccgttgacatttgttggattgctcgtagttggcgactgtcatcactgatggcatacacaacgattgaattatacccacggttggaagcataaaggaaacgaccgtctttggaaacacggattgcagcgccgccgtttgcttcgtgccaatctgcaggtaacattgagtaggtagcaaccgcgctaaaagtcccatcggctgcatgataatctaagaccgtcacttcactggacaattcacccaataggtaagctgtcttgtgattgggatggaagactaaatgccgtgtgccaaaaccaggttcactcttgtaaattgctactttggttaattgaccagcattgtcgacggcataagttactaattcatcggtgcccaaatcacagaccactaagcggtggtcaggtgttaggtcggtataatgtacgtgggcgctagcttgttcaggacacggaccgtggccttcatgaactgtcgtgctcgctaaggttaaactgccatcggcttggatttgataaacgagtatttcgcctttatggtaattggctgcataaacgagttggcggtcttcatcgactgccacgtatgctggtggtgcgccggctgctaagaccgcgttcaaaaagacaggggtgccactagctaagtcataggcagcaatcccaccttggtccccatctttaatgacggtgtagaggatgttgcggtttgaaatcgttaaataggatgcgttatcgagattaatgaatggttggatgtcactcacggttgcagttgttgcatcgaaaattccgcggtagatccctttaccaatccggcgggtataaccaccaattaaaacttcttctgtcataatcagactcccttcgtcaaatactctttgagtatagcatattcctgcgaaaacgatttaatttgttactaaaaggattcactagtcgctaaaactaagtcgcgaatatgctacaatgatactatcttaactaagaggagatttcattatgaacacgcaagcagaagtcatttcaattggcaacgacgccattgaggatcaagaaccgatggtcattttattcgatgaacatgcgacaactgccattcaaaacgtggcattgattcaacattttatggacgaagcggccaaaaaacagctaacactgacgacagattctgcggttattattaatcaacaaccttatacgattacgtatgtgggcgcgttggtaaatcctaacctcaacagtattggtcatgtcgctttagtttttggacctgcgccacaagaagatcaactgcaaagtgggctttatttaacaccagccgccgcgggtgttccggctgttcctgaattcaaagtaggaacgcagataacgtatcaagaaactatgtaggaattaggtgaattggtgtgacagagaataaacagccacaaacagaacgttcatggttctttaaatggtttttaaataagaagctaccgattgttttgttaaacatgttattaacgttgctgattatacttttattaacaaaacttgcttggctgttaaaaccaattcagtcgttgatgttgattattgggttaccgattattattgcggccgtcttgtattacttgaccaacccgttaattgattggtttgaacggcgttggcatttaaatcgggtattgtcgattacgattatttttattttaattgttggcttactggtctggggaattgcgacgattattccaatcattcaatcccagacaacgagtttaattgatcagtggccgtcttattgggcgaatattcaaactcagacgatgaaatggtttaacgacccagccttcaaatcgattcaaaaacaattaaacgatatcaatacggatgtgtttagtaatttatcaagcaaagtaaataaaatgctgacttcgaccgttagtcatattggaacagcggtcggagtggtgacgaacatagtcatcgcgattgtaacgatgccgttcattttattcttcatgttaaaagatggtcaccgaatgaaaggctatttgttaaaattcttcccggttaaagtacgcgccacaactgggaaagtgttggaagaaattaacacacaggtcagtcagtacatccgcggccaattgacagtggcgttttgggttgcagtcatatttactgtaggctactggattgttgggatgaagtacgggttgacgttggggattttagcggggattttaaacttaattccgtatttaggctctttcttagcgatggtcccatcagtgattattgcagcgtttatctcaccgttattattgattaaagtactcatcgtgtttgctgttgaacagaccttggaaggtcgtttagtttccccattggtcttggggagcaagatggcaatgtatccggtcacgacaatcattgtgttgctggcttcaggaaagttattcggccttgccggtgtgattctcggtattccagtatatgcgatcatcaagatattaattagtcacctttttgaatggttcaagtcagtttcaggcttatacgagcaataaaaaacgcacgatccgtaatgaatgcggatcgtgcgtttttgggtttttagagcgttaatttcatgtagtggtgggggatgcccgcttccatttcgccttcgctggtgacaataaagcctaatttttcgtagaaaccaatggcatggtcctgtgcgaataaaataatataaggcgttgtggtgcgtttagcgtcttcaatgatggcttcgattaattgatagccgagtccttggccacggaaagctttgatggtagcaacgcgctgaattctaaatccaccgtcttttaagacgtgcacgcgtgcggttactgctgggtcttgattgaggtaacctacatagtgaatcgtgtgatcttcgtgcgcatcaatttcctgtgtttccggcatattttgttctcggacaaacaccgttcttctaatgtatgttgcatcacgaaagataacactgttatctccaagtgtatgtttaatatccatttgtttcacacccttttctgatcaatgtagacgctaaggttaaaagcgacacgggtaattatacagttgtttcaagtcggattcaaccatttcagagaagtttttaggtacctaactaaaaagagccaaactaccgatttaaaaggtagtctggctcttttaactgttttttaaagcatgtcaccgttaaaaattgaatggcgaacaagaacgtaatcgactttcttcaatgatgataagcgtttaccaccagcataagaaatcgatgattgtaagtcttggcgcatttcggtgagcgtgtcactaatcgcacctttataaggcactaaaatccgtttgccctcgacgttttggtgtgtgcctttttggaattctgaagctgacccgaaatattctttgaattgttgaccatcttcttcgactaatttgccaggtgattcagcgtgtcctgcaaagagggacccaatcatcaccatgctagcgccaaaacggattgatttagcgatgtcaccgttggttcgaattcccccatcggcaatcatcggcttggtagcagctttcgcgcaccatctgagggctgccagttgccaaccaccagtcccaaagccggtcttgattttggtgatgcaaactttaccagggccaatcccgactttggttgcgtctgcacctgcgcgttccaaatcgcgaacggcttcaggggtaccaacattgccggcaatgacgaaactcttaggcagtacttttttgatatgttgaatcatatcgatcacgacttgtgagtggccgtgggcgatatcgattgtaatgtattctggtagtaagttatcggttgcgagttgattaataaagtcgaattcatcgtctttaaccccgacactgattgaggcaaataagccgcgctcgtgcatcatcttgatgaatgcgggacgcttttcaggctgaaatcgatgcatgacgtagaagtaatggttttcggcaagccagatggcaagcggttcatcaataatcgtctgcatgttagcagggacgactgggattttaaacgtttctgagccaaagcggacgctagtatcaatctcgctccgacttttcacaatacatttattgggaatcagttgaacatcttcgtaatcaaatacgtccattgggaattctccttaaaaacgaacatttattttggataacacggaatttatccgtgcataacgtataataacgagcttttttatgaaagtcaaataaaaaacacattcgaacccaaagaatgggagaatgtgtttgatgatagtggccttttgtaagttaaacgggttctaatccgcaggagctggcacacgctctatttaatgtaccgcttgcgccagaagcgatagactagcacaccagaaatgatcagggaaatgaataaagtaatcaaccaacttgttttggagcgagacagtggaaggtccacgttcatcccgtaaaaactaaatactaatccggggatggtgagaataattgaataagatgccaagaacttcataacactattcatgttattattaataattgacgagtaagtatcggctgtttcgttaataattgtgttggaaatttctgccatttcgatggcttgttgattttcaatctgaatatcatcaagcaattcaatttcatcttcattaagatctaacatattggtccgcattaaactagcgagtaccattttatcggtctttaaggacatcatgaaataaactaagccgcgttgaatggtcatcagatcgaagagttcttcattctgtagggaactctgcaagcgagtttcgatttgttcacgagagcggttgatgtcccgcaaatattggagatagatggatgaaatgcggaagagaatctggaggacacttctacggtgattttgtggattgaaacctttaatttggccatcaacaaagctctgtaaaaaggtgactggcgttttgttgatggttaagacggtcgaatctgttacaataattcctaagggacttgttttatagaggtatttatctggtttttgcgggtctttttcaagaattggtatgttgaaaataatcagggtcgcattataatcaggatcgtgctcagcacgcgcactttcatcagcatctaaactatagtagataaaatcagatgggatgtggagcttcttagtgagaagctcaatttcttcagtcgagggatcagttacgttaatccaactgttggactggattttagcatgtttggtgagctttttcttagcactgtcgaagcgataggtttcgagcatggtgtcacttccttcatcaataacttactgttaagtctactggatattttaagaatgtaaagtgcggtataaaagaagtgcgttcaaaccgggtatcctttgaggattagcctaattagacgaataagcggcgtagccgattgtttggctaatgtagctaaccggaacgggatgcttttgaaagcacgttaaatcaaggagaatcagaaatttgaaaaaaattgagctagccaagcagtttttaacgacgaacttggccgtattacaatgtccaatctgtcaggacgtatttgcaagtgtagccgagcaccaattactttgtgtcaatgggcatagttttgacctcgctaaaaatggcacgttatattttttagcaaagcaaatgaagtctgaatataccaaggaaatgttgcaacatcgccgggcttttttacaagcagggttctttcagccgttcttaaaagaaattgcatcacggattacccccgatagtttagtccttgatgtcggttgtggtgaaggaacgccagtgcaacagctcaatgcgcaagtttccgcgcgttatatcgggtttgatatttctaaacctgcgattcaattggcaagtgattacaatgccgatgcgtggttttgtgcagcagacttagcgcggatgccatttgctgatcaccagttagatacggtgctcaatatcttttcgccttcgcaatatcaagaatttaaacgtgtcttgaaaccgggcggtcaactaattaaggtgattcccaatgcgggttacttacatgagttacgggagttactgtatcatggtcaagctaaggaaagctatgatcatggtccggtcttagaattgtttgcgcaacattttccagattatcaagaaatgcaagttcaaaaaacaatgacgttaacacccgagacattgcgcgatttggtcgaaatgacgccattgacgtggacggcttctaaggcacaattagcggcaatcacgttagaagcgctacctgaaatttcattagatgtcacgattttagtgggaaaatgatgagaatttaaagaaagtttaaaaatctgattgcaactctaaaataagggcgctataatgtttttaaggaattttttccctaacttttatcagaatttattttgataaaagctagtgatgaaatgacactaacgtagtttctcgccgtgaataaccgagggactacgtttttttatttgcaaagcaaggtagagcttttgtgaattctattgtataattaatctactgaatcttttttaaggaagtttagaccgtgactaatcatattgtattatacgaaccactgattcctgccaataccggtaatattgcgcggacatgtgcaggaacagatactgttttagatttaatcgaaccattaggctttgaaaccgatgataagcatttaaaacgggctggtcttgattactgggaccaagttaagattaattatcacaagaacttggatgcctttttagcaactgtgcccgatcgtcaatatttatacttgattacgaagtttgctaagcaagcttattctgatcaagatgtgtcggatacaagtgttgatcattattttatgtttggtaaggaaacgaccggattacctgaaactttcatgcgtgaaaatgaagatcggtgtttacgaatcccaatgtccgaccatattcgagcattaaacctctcgaactgtgcggcattagtgatctttgaggcattgcgccaacaagattttccaggactcgaaaagagtcatttgtacgacaatgataaattaaaatagggagtgtttttgatgcaaacgaagaaagatccaattactgttgatgcttttcattatgaccgtgtttcacctgatgtagaaccacaacaaaatatccaagtcagcttagtcaccatcagcgaagaagatccatatttacaagaagctgatttgagcgcggggaatatttaccaaattgtgacgcctttccaagttgcaccagaaaagagtggctttgcagtgtcaggtcaaatttcacaagtggttcaactcttagatttctttggtgaaccaaatgaaattgatcaaaaagacatgatgaagctttcacgaccattgattgaatacatcgaaacattgacgtatcaagtgacggcggttgctttaaatcggggcgttcaactccaatttacagcgcaagccaacgaagactaatcagcgaaaggttgcggcaattttgccgtggccttttttagtaccgtgattaaaaacggtacgggactgacatttatgggtttagtagtacagatgttcgtgtataatggatagtaggatttaaggttgaaggagattttcatggccactaaaagtaaaaaaagaaaaccagcagcacgcaaaaagaaaaaacaacaaactgatttcacagttaacatcatcgggtttatttttattttaattagtttatttgcgggtttaaagctgggctttatcggcgcgctttgcgctaacgtattccgtctgtttgttggcgatacgttcattattagtgctattttattcgcccttttgggggtctatttgttgatttatggcaagcagccccccttatggcaccaaaagacgcttggatttgcaatcgcgtatctcgggattttaatttggttgtcagcattcgtcttgcaccatcaagcggtcaataaccatttcttggccgccacatggcagcttttattggaagacttccagaagatggccgttacgacggaagttggcgggggcttaattggcgccgcgttgtatggtgttttccacttcttgttcgcgcagatggggacttatctgatagccgtcttgattgtgattatcggcgtttttgttttcttagatattccattcagcgtcgttgttcagagtacacaacggtttgtgcatgggctctttaaagctggcggctacacgaaatcagggttccaaaaggtctctgaaaaaggtaaagcgcaagtcagtgctttaaaagaacagacgcaaaaagctgttcaaaatgcaactgaacaagcagaagagacgtcagagactaaagagcaagtggtcgcaacggacggtccagaaaatgcaccgaagcaaaaattggaaccttttaaaataaacggtcccaaggatctaccaaaaccaattgcaacgcaagcagaaccaactgcacccgaaccggtggttgacgaagatgagcatgtcccagatgtggcagaactcgcaccactgaacgagacggatgatgattacgaattgccaacaccagcattattaacgcaaattccggcgtctgatcagagtgcggaatataaagccatcgagaagaatcaacaggtcttgaaacaaacatttgattcgtttggtgttgatgtgacggttaagagtgctagtctgggaccagccgtaacgaagtacgagattcaaccggcagttggggtgaaggtctctaaaattgttaacttagcggatgatttggcgcttgcattagcggcgaaggatattcggattgaagcaccaattccaggtaaaccgtatgtcgggattgaagtgccgaacacgaccgtttcgaccgtttcctttagagaaatgattgaacaagaacccccacatccaggaaaaccactcgctgtgccgttaggtaaagatatttcgggtaaggtcatcatgtcggatttagccaagatgccgcatttattaatcgccggttcaaccgggagtgggaagtccgttgcaattaacgggattatcacaagtattttaatgagtgccaaaccacacgaagttaaattgatgttaatcgatccgaagatggtcgaattaaacgtctataatggcgtgccccatctattgattcctgtcgtgacgaatgccaaaaaggctgcgaacgccttgaacaaggttgtaaaagaaatggaacgacgttatcaattatttgccgatacaggtcagcggaacatgattgaatataatcagtatattcaaggccacaacgaagacggcgaaattaaaggtgcaccactgccttatatcgttgtcatcgtggacgaattatctgatttgatgatggttgccagcaacgaagtcgaaagtgcgattattcgtttggcacaaatggctcgggcggcggggattcacatgattgtcgctacccaacgcccatctgtcgatgttattactgggttgattaaggccaatattccatcgcggatcgcgtttgctgtatccagtgggattgattcacggaccatcttagatggcagtggcgcggaaaaactgcttggccgtggtgatatgctttacatgccaatcgggatgagcaaaccattacgggtgcaaggcgccttcatttcgagtcaggatgtcgaaagtatcgtgtcgtttattaaagcacaacaaacggctgaatacgacgaagaaatgattccaaccactgagcaggaaaagcaatcaactgaagaaccagaagatgaatattaccaagaggcagtcgaattggtcgttaaacaacaaaccgctagcgtatcaatgctccaacgccgttttagagtcggctataaccgggctgcacgcttggttgatgagatggaaagccgtggtgtgattggaccatcagaaggtagtaagccacgcaaggtgttattacaaaacgtaccagaagaaccaacagaacaatagcgtgtgacataagtcaaatatcgcctaaaatggcgaataagcgcgtcagcgattgattgacattcaggattaactgaaaggcgctggttgatggaactcggttaaactattaaatgaaaaaggccgcgacaaaaaatacttttgtcgcggccttttttgagttcaccttctttttttggtatgatagaatccgtgctatgaaaaaggataagttgaaaagagccattttaactgttgaaacagtgaggagtaatataacgtgaatcagaaaataacggatggcgtctacctgaatattttacaaactaaccaatttaaaacaattagattaaccgttcaattaattgcgcccgtcacagctgatgggatgacccgacgctcattattagcgagcgttctaggtgctagtagccaagcctatcgtgaccaagtcgcaattgcgaatgaattacaagccatgtatggtgccggctttaatatgaatgcctatcgacaaggaaacttggcgatttttagcatctcaatgcgaattgtgagcccccaatatctacgggatacaatcgacttgcaagaacaagcgattgcgtttatcgggcaattattattgcatccagatgtggttgagggccagttcaatccgggcatttttaaccgtgaaaaagagaacttagtgcggtatatcgaaagtgttgccgatgataagcaatcatacgcggcggttgaattacgcaaactctattttaaagatgcgacgcaacaaattcccaattatggggatgcagctgatttagcaaccatcacaccggatgaactatatgcgtattatcaatcgatgattgcaaacgatcgcgtccaaatgacgtttgtcggtaatatcgacgaagccaaaacggtcgcggatttggtacaattgccatttgcaccgcgtaatgttgaactgccaacgattttttatcaacaatcgttatatccacaagtgcaaactaaaacagaagtacaaacggtgcaacaaggcaagttaaacatggcctatcaaatgccagcttacttctatcaagctgattattatgccacaatggtgacgaacgccttattcggtggcacaccgctgtcgttactttttaccaatgtgcgtgaaaaagcgagtctagcctactatgcctcaagtgcaatcgatgcttttcggggtgtcattacggtacagactgggattgaaagtcgccaaaaagatcgcgtcctagagattatcgaagcccaacgtcaacggattatcgcgggtgactttgaacaggcggtctttgaacaaacgaagttggccttgattaatcaatttaaatcgagtctcgatagtgcggcctatttggggcaacaacaatttaatcgtttgtttgtgcctgaaactgaaattgatgcagagcgatttacacaggccatcttggcggtttctaaacaagcggttcaagaacaagccgcaaagatgcaattgcaagccatttacttcctgaaaggggtcgatacagatgaagcttagacaaaatccccgcttaggtgaaaccctctatgaaactgaattagagaatggcttgaccgttaaaatataccctaagagcggttatcataagacatatgcaatcttaacgacgaattatggttcaatcgataagacgtttatcccagctggggaaacggattatgtgacagtgccagatgggattgcgcattttctggaacataaattatttgagaaaaaagattatgatgcgtttgaaaagtttggtcgctacggggcaagctcaaatgcgtttacgagttttacgcgaacgagttatttattttcaacaaccagtcacttgcgagaaaatttggatattctacttgattttgtgcaagaaccttatttttcaactgagacggtcgaaaaagaaaagggcatcattggccaagaaatccagatgtataatgatgaaccggattggcgcttattctatacagtgattggcaatctctatccgagtcatccagtgcggacggacattgctgggacggtggatagtattgcgcaaattacaccagaagcgctctatcaagcacatgcaacgttctatcagcctagtaatatgaacctctttatcgttgggcaaattgatgatccggatgaagtggttgattggttgaacgccaatcaagcggcaaaaacatttgcccaaccaacagaaattgtacgttcattgcctgaagaagctgaagatggtcatgatatcattccgtatcggtcacttgaaatgccaattacgcgtagcaagagcatggtcggggttaaaggtttaacggattacggaacaggtgagttagcacttgaaacaaagttgaagatgaacttgttacttgaattgctatttggtgattcatcaacgcaagtgcaaaagttgtacgatgatggcacacttgatgatagttttggttacgaatttgccattcaacggtcatttaattttgtgacccttggtggcgatgcggacaatgcccaagaattatcggatgcgattattaatatcttagaacatgccacggaaagtcctgacttttcagaggataacttggcgttggttaaaagagccgcaattggtgaatacttgcaagcgttcaattcgctagaagccattgcgaaccaatatagtgatgaattctttaccgaaatcagtccatttgatgtcttaggtttgatcgaacaagtgactttagcggacttgcaacagatggcaaccgattatttcaaaattgaaacgatgacagtctgccacatcttaccggagggagcaaaccatgcctaaatcagccttaattatcggtgcatccggtgatattgggatgacggttgcgactgaaatggcggcggacggttggtcgctttatttacactatcatcaaaatcagacgcgggttacgacgctgcaaaagcaattgttgcaagactacccaaaacaggatttttttgcgcttcaagctgatttaacccaagaggacgctgttggaaaattgacaggccagctttttcaagtcgatgcggtcatttatacagcaggtgcgacgacgtatggcttattgccagagatcagtgcaacggcactcgatcacttatggcaggtgcacgttaaagcaccaatgctattgatgcagcagctgcaagcgaaactagcgcaaagtccattaggacgcgtcgttttaattggttcaatctatggtggccggggcagtgcaatggaagtgccatatagtacagttaaaggcgcacaatccgcctttgtgaacgcctatgcacaggaagtggcatcgcttggaatcacaattaatgtggttgcaccaggcgcagttgatacgaaaatgaacaatcagttcacaacagcagaacgggctgctgttgtagcggagatcccggccggtgcttttgcaaccccagcacagattgcctattgggtattgagtttaatggcacctgcagccgattatatgacgggacagacattgtacgttaatggtggttggttaaaataaagaaatcttaataatgcacatacgtaccaatatgctataattatggataatgatactgggataatagtgggtggaattgattatgaatgaaattggtcaaaaattacgtgaagcacgaattgaaaagggctacacactcgatgatttacaacaaatcacaaaaatccaaaaacgatatttaatcgccattgaagagggcaattttgatgccttgcctggcagtttttacgtgcgggcatttatcaagcaatacgcccaaacagtgggcttagataatgatgcattgttggcagaataccaagatgctgtaccagatacgaaaccagaagaatatgttgaaaaatccgttgaaaatcaaacccgattgacgcgcgaaacaacagattctaaatggtcgaaatggcgcaaccttgtcccacaaattacgattgtggcaattgtggtcatcattattggggtggtctatgggattgcgctcagcaaccgtggtaaagaccgcgaaacgttaaacgaaacaagctcatcggttacggtttctggggataaaccagatcctaagaaggataacagtagtgaagacaagtctgctgaaagcagtaagaaagccgcttctgaaagtaaggcacaagaagctagcaaggaagctgctgaagataaggctaagaagcaagaattaacggcgaagatgaccagcattaatgggtcacaacaagcttttgaaattaagaacttgccagctaaagccaaccaaattacgttctcagctgataaatcagctgcttgggtcagcttaacggccaatggccaacaaatttggcaaggttctgtcgcagttggtgccgaacaaactgctgaattacctgaaggtgttacgcaatttagtattcaaactgggaatgcacctgcaacgaagatgaagattaatggcaccgatattaaccttagtccaaataacgaagcaacgtttgtgcggacgattaatttcacagcaacattggctaaataaaggacattaaggagtcttcaacatgaatttaccaaataaattaacgatgtttcggattattttgattccgatttttactttgattttagtattggatgtgcctgcgacagccattatggtcgctgggacaagtattccagtcagtgcgattattgcaacagtgattttcattgtagcctctttgacggacttactagacggcaagattgcccgatcacaacatttggtgaccaacttcggtaagtttgctgatccattggctgataaattattagtgatgacagcatttatcttcttagtggcgctagataaagcgccagcatgggtggttgcgattattatttggcgtgaattagccgttactggcctacgtttattattaagcgaaggtggcgaagtgatggccgcagctatgccaggtaagattaagacgacgacgcagatgttagcgattattctattgctactcaacaacgtcttctttaacaatatcggcattccaatggcacagatcatgttatacgtttgcttgttctttacagtttattcgggtaccgattatttcatcaagaacagaggcgtctttaaagactcattttctaaataaacttaaactggcggggaatcccacgccagtttttttaacccaaaaagcacgaaaaaaacgcggtgattcgggtatagtagagtagcttaaaaaatatatagaacgtttgttcgatttttacttgcttttatttcgtgaaatcggtaaactaagagagtactgaaaaggactcttttgaggagggcacttaattggctaaagatgaaagacaagcagccttagatgctgcattaaagaaaattgaaaagaattttggtaagggctcaatcatgcgaatgggtgaaaaggttgatacacaagtctcaactgtttcatctggttcccttgcattggatgaagcgctcggtgtaggtgggtatccacgtggccgaatcgttgaaatttatggtcctgaaagttcaggtaaaacaaccgttgccttacatgctgttgccgaagtgcaaaagcaaggtgggactgctgcttatatcgatgctgaaaatgcaatggatcctaagtatgcaactgccctcggggttaatattgacgatttactcttgtcacaaccagatactggggaacaaggcttagaaatcgccgatgccttagtttcaagtggggctgttgatattttagttgtcgattcagtcgcagccttagtgcctcgtgctgaaatcgaaggcgaaatgggtgacgcgcatgttgggttacaagcccgcttgatgtcacaagccttacggaaattatcaggaacaatcaataaaacaaagacgattgcgttattcattaaccaaatccgtgaaaaagtcggcgtgatgttcgggaaccccgaagtcacacctggtggtcgcgcattgaaattctattcaaccgttcggcttgaagtccggcgtgctgaaaccatcaagaatgggaccgatatgatcgggaaccgtgcgcggattaaagtggttaagaataaggtggcaccaccatttaaagtggctgaagtcgacattatgtatggtcaagggatctcacaaacgggtgaactggtcgacatggcggtcgaaaaggacattattaataagagtgggtcatggtattcctatggggatgaacgcattggtcaaggacgtgagaacgcgaagaattacttggctgatcatccagaagttcaagatgaagtccggcttaaagttcgggaagcatatggtatttcggatgtcccagtagatgaaagcgatgaaacacaactcgacgtctttacggatgacgattcaaacgaataagaatcattaagctgaggcaaaagttattttgcttcagcttttttgattgcttaaccgaattattctgatggtcgatttgattgactgaactcgaaaacggttgcaatgccgatagtttaagttgacaggcggtttatgaaactataaaataactatgtgttgaaaaactaaacataataacatctttaaaaatttgcagtgaaagttgcaattcaaaatttttgatgatgcggaggtgaaacaatgaacttagcttttccattaatcctcgcagtcatcatgttaatcgttggtttactagttggttccgttctacaaaagaaggcgcacgaacgtgaaattgatggtgcaaataagactgccacaggaataatcgcagcagctgaaaaagaagccgcaacgcggaagaaagaaattcttttggaagcaagggatgaaaatcaccgctatcgttctgagattgaaaatgaattgaaagatcgacgcagtgaggtacaaaagcaagaaaaccgtttgattcaacgggaagaaacaatggatcgcaaagatgcaacgttggataaaaaagaacgttcattggagcaacgtgaaaatcgtttaacgaatcaagcacaagagctaactgaaaagcaggcagaagctgccactttagttgagcaacaaaaagcgaagttgcaagaaattgccgaattatcgcatgatgaagcgcaaaaaatcattttggatgaaacgaaacaagaccttgaacatgaacgggctgttttaatcaaagaaagtgaagaaacagctaaagaacaagctgatcggactgcgcgtacattagttgctgaagctattcaacgcagtgcagcggatatggttgctgaaacaacagtaactgttgtgacgttaccaaatgatgatatgaagggccggattattggtcgtgaaggtcggaatatccggacattggaaacactgactgggattgacctgattatcgatgatacgccagaagcagttgtgcttagtgggtttgatccgattcgtcgcgaaattgcgcgcatgacattagagaagttaattcaagatggccggattcatccagctcggattgaagaaatggttgataagtcacgcaaggaaatggacgaacaaatcagacaaatcggtgaacaagcaatctttgatgttggtgtgcacacaatgcatcctgatttaatcaagattcttggtcgattacatttcagaacaagttacgggcaaaacgtcttgaatcattcaattgaagtggccaagttaacggggattttagccgctgaattgggtgaagatgtgacactcgctaaacgagctggcttgttacacgatatcggtaaggccctcgaccatgaagtcgatggctcccacgttgaaattggggttgaactagcaacgcgttataaggaaccggcaacggtgattaacgcaattggttcacaccatggtgatactgaagcaacatcgattatctcagtcttagtcgcagctgctgacgcgatttcagcggctcggccgggtgcacgttctgaatcacttgaaaactacattcaccgtcttgaaaaacttgaaagtattacgaatagttttaaaggtgttgatcatagttttgcgattcaagcgggtcgtgaagttcgggtgattgttaaaccagaacaagtcacagatgaccaagcaaccgtcttagcacgtgatgtgaagaatcaaattgagaaccaactcgagtatcctggccacattaaggtgactgtgattcgcgaaacaagaacggtcgaatacgcgaagtaatgcggattggcctaacattgaagcgggggacaaaaccaattttgttccccgctctttttttggttttaattaaaattgtggaggacattatcatgaaagaaggtgtgttattagttaatttggggaccccagataaaccagaagtcaaagaaattcgccattttttaaaacatttcttagctgatcagcgggtcgttgcgatgcccaaagcggtttggctccccattaaaagtgtacatgcaacagcaagttgctcaattacaagctgaattacccgattatcaagtttttgaggcgatgtcatatagtcaaccattcttaaccgatgtgcttagtgagattcaaacggcgggaatcgatgatttgacggtcgtgccaatgtatccgcaatattcaacgactacgacgatgtcggtttatgatgtagttgcgcagttttatttaaaacaatcaaacatgccaactttgcattttgtgaaggacttttatcaacgctcaggctatatcgacttgatggcaacggcgattgaacagaagctacagacgcaaacctatgacgaaattattttgtcataccatgggattccaaagtcgtacgtaacaaaaggggatccgtaccaagcacagtgtgaagcaactactgcgctattgcaggcgcgcttgcctaaacaaacttttcggaccacataccaatctaagtttggaccgaatgaatggctaacaccggccactagcactacgatgcagtcattagcccaagaaggcgttagaaaaattttggtcctaaccccgggctttgttgcggattgtttggaaactatcgaagagattgatgttgaaaatcgggactattttatggataatcaaggcgaacaatttgattacattcatccctttaatgctgatccacgatttacggccttattagcccagattgtgcgggacagataatcagggtgcttggcttttgcttaagaaatcaagtcattgttgtgtttaacgggtttgatttgtataataaagagaatgcaagagaaagtaggcaagttgaatgcaacccatgtttaaaattatagttggtctatttgcgacgatgctcgtatcggccgcaattaccccattagtgcgccgcctcgcgtttgttttaggcgcagttgataaaccaaatgcccgccgagtgaataaaaaggcgatgccggcaatgggtggtctggccatttttatcgcgtttacgtttgggaccttcgtattattacgcgggcaattccaaacacacgaacttttcagtatcttcttagcagaatgtatcatcatcatcactgggatgatcgatgatattaaggaattgaatccaaaggaaaagatgctcggtattttattagcagcattggtcatttatttcttagcgggcgtccgcatgaatattttgacaattccatttttaggcacctttgaactaggatggttaagcttcccaatcaccattttttggattctggcaattaccaacgccgttaatctgattgatgggttggatggcttagcaactggcgtttcgattatcgcactcttcacaatgggcgtcatcgcctatttcttcttatcaatcaccaatgtcagcgtctcaatcatgattttttgtttggtcgctgcattaatcggtttcttaccacataacttccatccagcgaagattttcttgggggataccggggccttattcattggttttatgattgcggtcttatcgctcaaaggtttaaaaaacgtgacgttcattacgttattgattccagttattattctcggtgtaccaattacggatacaatttacgcaatgttgcgccgaattttgaataaaaagcccatttcacaagcagataaacatcatttacaccatcgtttgatgcaacttggtttatcacatcgccaaacggttctcgtgatttatggactggcattggtcttctcgttgatttcattgctctatccactatcgacactctggggaagcttggcattgacggtagccgtcttaattggcttagaattatttgttgaatcaattgggttacttggtgacaatcgccgcccattattgatgcttttaaaacgattattaaaaccgaagaatgaagaaaaggattagccattggctaatccttttcttgcgttattggtagcgaatctggtgtaaatcctgtgcgctaatggggacttcgttgaattgttgagggccaaggtcgaattgtaattggccgttgaggcgttcggttaattgttgttgtaaatcactaactgctgtagtcgctaaccagacggtcatttgaatgttagtcgtatattggatgtcttcggcagtgaggtttaattggctaagtaaattttgcacagtgtcaaattgagcgtagtcaattgtaatctgacaagcggtttgttcgataccttggacaataccgaggtgttcaagtccggccgaagtggcgtgactgtatgctcgaataagaccaccagtaccaagtttgatgccaccaaaatagcgggtgacaacgacacacagattagtgagctgcatctggcgcagtacttctaacattggcacgccggctgtgccacttggctcgccatcgtcactttgtttttgaatattggccgttaaacctaattggtaggcgaaacaattatgattggccttcagatttgctttgcgaacttgtgcgatgaacgcttgtgctgcggtttcgtctgtgacacgcgcaacatgacagatgaagcgtgactttttgatttcgagttcaaattcgccgtctttttgaacggtaaaataactttgcataccggactccttgaaaaaataagctggatttaacggaactaagggtggaaggtgaaatgatggcaaaacaacttgcttatggtcgtcagtggagtgccacccaattgagtaccgttatgaataattatagtttaccacagattaaacagcgactagcgtttcaaatagttaatcagcgtctggtatgtcaacggtgtggacaagtggtgaaagagcaagctcgcttacctgatggtcggtattattgtgctgcttgcttgacctttgggcggttagtggaaggggatcagttggtttacgtgcctgaatgcaatctgtttgagtcgatcgtagaaccgctaacttggtcggggacactaaccccttttcaagcacaagccgcaaagcagattgttgcggtcattaccaagcaacaacgccatgtcttaactgcagtgaccggtgctggtaaaactgagatgttatttcaaggcattgcgacggctttagctaatgggcagcgtgtgtgtgttgctgcgccgcgggtggcggtttgtttagaactctatccgcgcttgcaagcagcgtttgctaacacaccaatcatgctgatgcatggggaacagactgcgccttaccggtatacgccgttagttgtttgtacaacccatcagttatttaagttttatcaggcatctgacactgtcattgtcgatgaggttgatgcgttcccatttgtcaataatccccagcttgagatggctgttaaacaggcgtgtaagccatgctgtgcattgatctatctgacggcgacaccaactgtaaagttgcgccatgcgattaatacaggggatttaacgggtagtgagctaccaattcgctttcatggtcacttattacctgaaccgcattgctatcccttgtttacgtggcggcgttcagttaaacggcatcagttaccatccgtgatgcgcaacttactcaggaagtgtcttcaagaacaacgcttattattatttgtgccacaggtaagggatttagaggcggttcagcagagcgttgttcgggcattgccacacattacagtgaacacggtacatgctggcgatcctaatcaattagacaagatagcggcctttagagcaggatgcggggacgtgctgattacgacgacagttctagaacgaggcgtaacgtttaaaaatattgcagtgtttgttcttggtgcagaacacgtggtcttcactgaatcagtgcttgtacagattgctggccgagccggacgacagcaagagcatgctgccaatccggtttattttttctacgcggattacacggtcgctattcagcgtgcgtgtcaacaaattaaacaacaaaatcgaaaaggacggcgattacaatccactgtttaatgtgtgcggcagttatccttgaacaaccctccattgcattgatttgttcattgcgaccagtctatccggcgatgatctgttcacgttgcatggcacagtttgaacggattgggccgcagtgttgttcgggatgtggtcggcaaatgacaacccagggggtgtgtccggattgccagagatggcagcaactgtatccaggcgaacaatttactaatcgagcgttgttaacatacaacgaaccaatgcaacagtattttcaacgctataaggggcagggggattatcgattacgtcacgtatttcaacggctgattcgagaaaattttcctgtgcaacggcaaacggcgtatatcccagtcccgactgatccaacacatttgcaaagccgcggattcaatccggtggttggcttatacgaggactgttttccactgaccccattgttgcagaagctaccaactgaaaaaggacaagcacaaaaaaatcgtgcagagcgcttagcaacgccgcaattttttaaatgcgcgcagaacgtgctgttgagttccaaggtgcagcagttaattttgttggatgatatttataccactgggcgcacgttatggcatgctcagcagtgtctccgcaagcgataccaaacgctgccaattcacgcaattactttagtccactaggaccatattatttgtgtgttacgcgcaaattatatataatgaagtcagtaacaaagcctcgggaaagaattgagttccgagcgacaagtgcccacagggggtatttgtgaaaggggagaattcatatgctaagttttaatgttcgtggtgaaaatattgaggtaactgacgcaattcggagttatgttgaaaagaaaatcagcaaactcgaaaaatatttcgatgattcagcgaccgcaactgcacacgttaatttaaaagtgtactccgataaaaccgctaaggtggaagtcaccattccattaccataccttgtattaagagcagaagaaacatcgcctgatatgtatggtagcgtcgacctagttactgataaattagaaagacaaattcgtaaatttaaaacaaagattaaccgtaaatcacgtgaacgcgggattaaaggtatggaattaacggtgccagaagcagaagcattaccagaagaatcaatgcaagtcgttcgaacaaaacgcgtttcattgaaaccaatggatagtgaagaagcaatcttacaaatgaatatgctaggccatgagttcttcatcttcgaagattcagaaacaaacggtacaagcattgtttataaacgtcaagatggtcgttacggtttgattgaaactgatgaataagtgaacgttaagttagggctgggacaacgatgagttgcgctcagccctttttttgtagccatatagataatggggttaaatttttactgaattggctggattgtttactgtgacagggttttatttgattgtaataaatggtaaaatgaattgttagtaatcatattgactatataagaaatcgctatttaagaactcaaacgtatttctagaggagaattgacgcacatggcaaactttctaaaaacatgggtagaaagcgataaacgtgaagtagcgcgaatgggcaaaattgccgatcaagttcaaagctatgaagatgaatatagtaatttatctgatgaagcgttgcaagctaagaccccagaattcaaaacaagattagcaaatggtgaaacattagacgatattttaccagaagcttttgcggttgcgcgtgaaggtgctaaacgtgttttagggttattcccgttccgtgtacaaattattggtgggattacgctacacgaaggtaacatcgctgaaatgaaaactggtgaagggaaaaccttaacggctaccatgcctgtttatttaaatgcattggctggtaaaggcgttcacgttgttaccgtcaacgaatacctttcaagtcgtgatgcaacggaaatgggtgaattatataactggctcggtctttctgttgggttaaacttaaatgctaagacaccagaagaaaaacgcgacgcatacaactcagatatcacttattcaacgaatagtgaacttgggtttgattacttgcgcgataacatggtggtttacaaagaagaaatggttcaacgaccattgaactttgccattgtcgatgaagtggattcaattttaattgatgaagcgcggacaccattgattatttctggtcaagctgaaaagtcaacagcactttatatccgtgctgatcgttttgttaaaactttaaaagaagaaactgactataagattgattggccaacaaagaccatcagtctaacagaatcagggattgaaaaagctgaggctaacttcggcttggacaatttatatgacactgaaaatacagccttgacgcatcatttggacgaatcattacgggccaactatatcatgttaaaagacattgattatgtggttcaagaaggcgaagtcctaattgttgaccaatttacaggtcgtgtgatggatggtcgtcgttattcagatggattacatcaagcgattgaagccaaagaaggcgttgaaatccaagatgaaaccaaaacaatggcgaatatcacataccaaaattattttagaatgtacaacaagttatcagggatgactgggacggcgaagaccgaagaagaagaattccgcgaaatttacaacatggaagttatctcaattccaactaaccgcccaattgcccgaatcgataaaccagatgtgctttatccaactttggaaagtaaatttaaggcggttattgaagatatcaaggaacgttatactaagggccaaccagtattggttgggaccgttgcggttgaatcttcagaattactatcgcgattactagatgaaaataacgtgccacacgctgttttgaatgctaagaatcactttaaagaagctgaaattatcatgaatgctggtcaacgtggtgcggtcactatcgctactaatatggctggtcgtgggactgatattaaattaggacctggtgtgacggatttaggcggtttggctgttattgggactgaacgtcatgaatcacgccggattgataaccaacttcgaggccgtgctggtcgtcaaggggatcctggtgtcacacaattctacatgtcattggaagatgacttgatgaaacgtttcggttcagaacggattaaagccttcctagaccggatgaagatttcagatgacgatgcggtgatccaaagtaagatgattacgcgtcaagttgaagccgcacaaaaacgggttgaagggaataactacgatacacgtaaacaaacccttcaatacgatgatgtgatgcgtgaacaacgtgaagtcatctataaacaacggatgcaggtcatcatggcagaagataatttgaaagaagttatcatgccaatgatttcaagaaccgttaaacggattgtgcaattgcatacacaaggtgaaatggggagctgggaattagaagcaatccacgcatttgccacaacttcaatggtcagtgaagaagaattaccaattgaaaaattacaaggtaagactgctgaagaaatcgaatcattattgatgacctttgcagaaaagaattacgcaacaaaacaaaaacaattagcagatgcagatcaaatgctcgaattcgaaaaagtcgttatcctccgtgtggtagatgaacgctggaccgatcatatcgatgcaatggatcaattacgcaactcaatcggattacggggctacggtcaaatgaatccattggttgaatatcaagaagaaggttaccggatgtttgaagaaatgatcagcgacatcgattacgatacaacccggctcttcatgaaggcggaaatccgtcaaaatattcgacgctaacgcgtagaaaatggctgaggtagttaacttagccattttttaatgggaaaaaatagtggagggactaaaatatggaattaagtgaagcaaaacatcttttagaagcaattgaagctaaaataacgcaatttagggggtcactttgacttagatggcctgcaagaaagcatcgcgcaaaatgaagcgcaaatggcggatcccgatttctggtcggatcaaaaagcagcccaacagttaattgatcaaaataacgccataaaggaaaaatacgacgcttttatgcaacttcaagcgcaatcagaagagctacaagtgacattagagctattacaagaagaacccgatgctgaactccagacgagttttgaagctgatttgacggctgttcaagctcagatgcaacaatatgaactcggacaattactatcgggcgactatgatagcaataacgcgattgttgaattgcatcctggtgctggtggtacggaatctcaggattggggttcaatgcttttgcggatgtacttacgctgggcagatgcacacggctttaccgttgaaacagaagattaccaggccggtgaagaagctgggattaagagtgtgaccttgatgattaaagggcacaacgcgtatggcatgttacgttctgaaaaaggggtccatcggcttgtacgaatttcaccgtttgattcagctgggcgccgccacacctcgttttgttcagtcgatgtgatgccggaattggatgattcgattgatatcgaagtccgcaccgaagacttacgaattgacgtcttccgttcaagcggggctggtgggcaacatatcaataaaacatcatcagccgtgcggttaacgcatttaccaactgggattgttgtttcatcacaggcgcaacggtcgcaattgcaaaaccgcgaaactgcgatgaatatgttgaaggctaaattgtatcaaaaagaacaagaagaacaggcgaaaaaagcggctgctattaagggcgaacagcttgaaattggctggggctcacagattcgctcatacgtattccatccgtacacgatggttaaagaccaccggaccgactacgaaaccggaaacgggcaagcagtcatggatggcgatttagatccatttatgtatgcctatctgcaatggcagttgagtcagaagaatcccgactagctgcaaagaaattgaaatataaatgtaatcaaattgtgattatttgaataaatagcatgctataatataaaagattgcggttttcattgacaataaataatgataacgacaaaaaaaggagtgtccccaattgattcgaatgacaaatgtgtcaaaaaagtatccaaatggcgtgacagcaattaaggatctttcgctaacgattgaacccggcgaatttgcttatattgttggtcccagtggtgctggtaaatcaacattcattaagatgttgtaccatcaattaaaagcaacgagtggtgaaatcgaagtcgctggttttgatttaatcggtatgaaggatcacgatgtcccatacttacgccgtaagatgggtgttgttttccaagatttcaagttattaccacgtttaacggtgtttgaaaacgtggcatacgccatggaagtgatcgaggcagaacctcaagcaatcaaagatcgtgtattagaagtgctcgaactagttggcttgaagggtgaaattcgtcgctttccaaatgaactttctggtggggaacaacaacgggtcgcggttgcacgtgcgattgtgaaccggccagatgtgttgattgccgatgaaccaacggggaatctagatcctgaaacgtcagatggtattatggatattttagaagcaattaatgaacgtgggacgattgtcttaatggcaacccataacaaacaaatggtgaacgaacggacccatcgtgtcttagcgattgaagacggtcgcttagttcgtgatgaaaaagaaggtgactacggctatgaagattagaacattgaagcgtcatctcaacgatagttttaagagtttaaaacgaaatggctggatgtcaatcgcagctgttagtgcagttaccgtaacgttgttattagtcgggattttctttgcgatgatcttcaactttaacaagatttcacaagatattgaaaatgatgtgcacgtgcgggttatgattgaacggggcacaacaagtaaacaaaaagatcagctacaaaagaaacttgaaaaaatggcgtctgttaaagaagtgacgtattcaagtcgtaaaaaggaattaaacaaggttgtcggcagttacggtcaatcatttaagatgtttaccggagacgataatccgttgtacgatgtttacacagtaagtacgacaaaaccaagtcaaacgattaaagtcgctaaacaagcgaaaaaattgaaatacgtttatgatgccacttatggtgggaacaacgctaagaagttgttcaaggtaatgagtagcgtccgtaaatggggcgttggttttactttattattgctctttgtggcagtgttcttgatttccaatacaattcggattacgattttatcgcggcgcgacgaaatcggaattatgcgtttagttggggcaactaactcgtatattcgctggccattcctttttgaaggggcttgggttggattacttggggtaattattcccattattgtaatcgacttaggttatggttgggtttaccgtcatatggcactcagcatggcttcagccggttattcaatgttgaaaccaggaattttcttattccaacttgatttaacaatggctgtgattgggattgtgattggggcattaggttctgtcatctcaatgcgtcgtttccttaaaatttaaactaaattagtgaaagagtgacgaacattaaattgttcgtcactctttttttttgaaccctaggcagttaagggggcaaaatgctatactgattgggataactgcgaaattcggcagctggaaatcgagcgtgtgtcgttggaaacacgcacggtatttaaatatagacgctgggggtttgttgaattgacgatgatcattgatattttgcgaccattactaacggcaccacttttatggttagcgattgtgtatgctggctggttagcgcatagacgaattagcttggaacggaagacctttagaattgcgattaatccacgatggatagaagtgggccattttgtgggccatgggctactcgcagggctagccttaagttgctgtaccttagtgttaggggcgatggttaatatgcaatggtggctggtctatcaactaatcgctattttgagtttgctagtggctgctagatggcaaaacgtatcggcaacctttttaatcagtgctttggtctacgctggtgcaacattcatatggccccaatatcagatggaaggtcaagcaagtcttttggctgaattattggtgattattgggttagtgaccgtcatcaatagtgttttacaacgttgggatgccgaggcaactgtgacaccgcgtgtgatgactagcaagcgagggcggttgacggccttctttatgagtcgacaaatttatattgcgccggtctttttcttagtgccaggggcaattgatatgccaagtttgggtttttggccggtcttaaatatcgggcatcaatcatatagcttggtaatcttgccattgttattgggatttagtttgaaagcagtcaaaggcttaatgaaatcagttgttactaaaaatgccaatagctatttgatctttggcttgttgttagttgggtttgggttaattgccgttgcatttccgaactggattattggcatgttaacagttgcgctagtactaagctgtgcattacaatggcggttgagtagacgcagtgcccatgaacggcagttgcactttacgaaaccctacgatggcgtctttatcttagggattttacgcgaaacgccggctgctaaaatggggttggtcgttggcgatacaattgttgaatgtaatggcgaggctgtctcaaataacgataatttttatcgggcgattcaaagtcagccaacgtattgccatttaaaggttcaagatttaaacggtgagttccggatggctgaaggcgcaatttttgctgatgcaccacatgagttaggcgttgtattattcccagagaattaagtaaataaagggtggcatgaatgaagacaattttagtggtagacgatgaaccagcaatcttgacattattacgctataacctggaacaagaacattttaaagtgatgacggcaactgacggtgcacaagcgctgacgatggctttacagcagtcgtttgattttattattttagatttaatgttgcctaagctagacggaattaccgttaccaagaagattcgggaggcaaagttaaaaacgccgattatgattctaacggctaaggatagcgaaaccgataaaattgtcggcctcgaagtgggggcagacgactatgtcactaaaccatttagtccacgcgaaattatcgcgcggattcgggcaattgaacggcggacggcacagcctgtagcagtcgttgaaacgcaccctagtgatattttacaagtaggggacttaatggtcgatgaaggcgaagttgtggctaaaaagggcactcagaagctccatttaacgcctaaggagttcgaactccttgtttactttatgcatcggattaacaaggttcaaagccgtgagaaactcttaaatgcggtgtggggctttgattatccagccgaaacgcgaatggttgatattcaagtcagtcatttacgggaaaaaatcgaaacagatccgcgtcatccagtttacttaaaaacggtgcgtggtttcggttatcaattggaggaccccgaccatgaccaaacatgatcaatttagattttatcagctagccactattttagtggctgtttacataggttttattgtgcttgtcaatttggtgattgcccaacaacaagacgcgatgttaaaggaacggggcgccgactatgcgctaatcatcaaacaaccacagtttgatcggcaaaagtggttacgccaaaacggcttacaagttttgacgccaaaatcgccgaataaaacaaagttgcaaaaagcagtgacggatattgtcaatcggaatcattctgccgccaattttagtacgcggcaaacagttaataagcaaccgtatttgttttacgcacaccaagcagatcggcccaactttgtcttagtagtgcctcagcaacagttctggcatacgtggccgaagattgctttatcggtcacgattgtctatttaatcggtagctggatttttctataccgtttctggcggcaacgccgtcatttctttgaccacttgaaaattttagtcgctaatattcatcatattcggcatgaagaagtgcccgaaccgattatttttcaaaaagatgcgtcattatatatcctcgcgcaagaaattaataaattaaatggtgatatgcggcatatgcggcagaagattgccatgcaacagggcagttttgaccgcctaattgaccatttaccggtcggcgtcatggtgattaacgaaaatcgtgaagtcgttttgcacaatgaagcaatggatcggttattggagacgacgattgttactgagaaacacccctatattgatgatatcaagacgtatgaattaacacggatgattgagcacacttttaggtaccgaaagagtcatcaccaagaaattcagttgattcaaaatcaagaacggtttgtggatgcgaatgttgtccaactcaatacggttaaatcgaaattccaagcattagtcattttatatgatttaaccgatgtccggcgcgttgagcagatgcagttggattttgtcagcaatgtgagtcatgaattgaagacgccggtgacggctattacaggctttgctgagacgttgttagctggtgcggcggaagatcctgccacgcaaaagcaattcttacaaatcatctatgacgaaagtacgcgattaactgcgctgattcaagatattttggcgctttcgcatctagatcgtaaggaccaatcgcaagagcaacttgtgaatgtacgtgaattggtgcaggctaatctcgaactgatgcaacaaaaggcacaacaaaagcagttacacgtctccgttgatattccaacggatttagcgattagaattcagaaaatgaagtttaatcaaatcttgaaaaacctaatcgctaacgccatcacgtataataaacaaaacggctcgttggtgattgccgtgcaacttgaaaaagatcaaattgttatccgcgttgtcgataccggtttgggcattccaagtgacctacaagaaagaatttttgaacgattctatcgggttgatcaagcgcgcgcgacccataagagcgggaccggccttggactagcaattgctagcgagattaccgccagtttagaggggcagttgaccgtaaagagtcaattaggtgtcggtagtgaattcattttgaagctaccaaacgcttgatttacacaaaatttacatttgataggcttagtttttacaaaccttttttataatggaacttacgaggtttaaatggaattcgtggaggattaacatgcgcaaacgtaatgttattggcttattagtcacattcagtttattactattggctggttgccagtctaaacaaaatggtcagtccgtaacggcggtcggctcatcagcccttcagccgctgattgaagcgttagctgaacaatacagtgctgatcacagcggtcagttcattaacgtccaggggggcggttctgggactggcttgagtcagattcaatctggcgctgtacagatggggaattctgatttatttgctgaagaaaaggctggcattaaagcggacaagctggtcgatcatcgcgtggctgttgtcggcattaccccagtcattaataagcaattagggattaaaaacttaacattgacgcaactcgcgaagatttttagtggcgaaattgataactggcaagacgttggtggaccagatcagccggttgttttagtaaaccgagcccaaggtagtgggacgcggacgacgtttgaacaatgggtgatgaagtcgcgcaagactaaacccgctcaagaacaagattcaacggggatggtgcgatcaattgtagcgaacacgccaggggccatcagttatcttgctttttcatacgtagatgattcgattgcaatggttaaattaaacggcattgcaccaaccgatgaaaacgtgatgactaatgcatggccaatctggtcatatgaacatgtttacaccaaggggcaaccaactgggttaacaaaacgtttcttggcgtatgtcttatcagatgaggttcaacataaacaagtcggcaagatgggctatattccagttgctaagatgacggttgaacggtcggttgatggcacaattacaaaggttaagtagggggccaattatggatccaattaaagcaagtttacttaagaaatcacgcgcagccaaaagtgaaacacggggcaaattaatcagtttattctgtattagtttaatcgtgttcatcgtgctcgccattttctacttcgtcgcttcaaaagggttagcgaccttctttaaagataaaatcaatctaggccgctttttaacgcagtctaattggaatccaagtttgaaagatagtcatggtcgaccagaagtgggcgccttaccaatgattatggggtcatttggagtgactttcttagcggctttattagcaacaccgtttgcaattggcgctgggatttttatgactgaaatctcacctaagcggggtgaaaaattattgcaaccagtgatggaattgctcgttgggattccatcagttgtttacgggtttatcggattatccgtgattgtaccagctgtccgtcatttgtttggtggcagtggctttgggattcttgccgggacttgtgttttgttcgtcatgattctaccaactgtgacatcgatgacagtcgatgcactcaagagtgtgccacggcattatcgcgaagcctcactcgctttaggtgcaacgcgttggcaaacaacatggaaagtcgttttaaaagcagccacaccagggattttaactggggttgttttcgggatggcccgggcgtttggtgaagcattggccgtccaaatggtcatcgggaacgctgcgttattaccacataacttaattaccccagcctcaacgttaacgagtgtgttaacgatgggcattgggaatacggtcatgggttcattagccaataatgcactttggtcattggcgttactcttattattgatgtcactactatttaacttattagttcgtttaattggtcggaagggagcaatgggtcgctaatggatgcaaaaaaatgggataaagttgccaccggtgtgctaaccctcatcgctggtttgatcgtattattattagcaagtttgctcggctatatcttggtgcgcggattaccacacgtgacgtggcagtttttaacgaaacctgcgcaaacctttactaaaggtggcgggattggcgtccaactgtttaattcattctatctattaattttggcgatggtgatttcagtaccgttatcaattggtgccggcatctatctcgcagaatatgcgccgaagaactgggtgacgaatgttgttcggaccgcgattgaagtgttaagttccttaccatccgtcgtggtcgggttattcggtttcttggtctttgttatccagtttaagctaggcttttcaatcttagcgggtgctttagccttgaccgttttcaatttaccgttgttaacgcggaatgtggaagatgctttaaaatcaattcacttcacacaacgtgaagcaggtcttgcacttggtttatcgcgttatgaaacggttaagcatgtcgtgattccagaagcgttacccaacattattaccgggatgattttaggcgctggccgggtctttggtgaagcggctgccttgatttatacagctggacaaagtgccccatcacttgattttaccaactggaacccaatgtacatcgcgagtccgttgaatccattgcgacctgcggaaacattagcggtgcacatttggaagattaactcggaagggattatgccggatgcgactgcggtttctgctggcgcatctgccgtcttaatcatcgccgttttactatttaactggttagcacgggtcatcggcaagcgtgtctaccgtaaaatgacagcagcataggagaaaataatggcagattacgatttaacaaaaacgcacatcaaacatttagatgaaccaaaacatgaaattgccttatcaactgaagatttaaacgtctattacggcgacaaacgcgcgatgcacgatgcatcattgcaatttgaacgctatcgaattaccgcgttaatcggcgcttctggttcaggaaagtcaacctatcttcggagtttaaaccggatgaatgacaatattgctaatacacgtgtgaccggtaagattatgtaccggggcttgaacatcaatagcgatgacgttgatgtgtataagatgcgggaacatatcggcatggtgttccaacggcctaatccatttgccaaatcaatctatgacaacatcacttttgccttgaaacaacatggacaaaaagacaaaaagtatctggatgaagtggttgaaacgtcactaaaacaagctgctttgtgggatcaagtcaaagattcattaggaaagagcgcattggcactatctggtgggcaacaacaacggttatgtattgcccgggcaattgcgatgaaacccgatattttattattggacgaaccggcttcagctcttgatccaatttcaacgaacacggttgaagaaacattgattcgcttaaaagaagaatttacaatcatcattgtgacgcataacatgcaacaagcagcacgaatcagtgattacacggcctttttccattcagggcacgcacttgaattcgacgaaacacgtaaaatgtttacccggccgaagattaaagcggccgaagattatgtttctggtcactttggctaggacgcaaggaggtttgccccgtggcaaataagattattgaatcctcagatgtgcatctattctatggtaagaatgaggccttaaaagggattaatatggattttgttgaaaatgaaattacggcgctcatcgggccatctggttgtgggaaatcaacctacttgcgctgcttgaatcgaatgaatgatttaatcgactcggcgaaggtgaccggtaaattcttattgaatggccaagatatttatgcgcctgagatggataccgttaagttacggaaagaagttggcatggtgttccaacaaccgaacccattcccattttcaatctatgacaatgttgtttacggcttacgtttatccggtgttaaagatcatcgcgtcttagatgaagccgttgaaagtagtttgaaacaagcggccgtttgggacgacgtcaaagataagttacacgaaagtgctttatcactttctggtggtcaacaacagcgggtttgtatcgctcgggtgttagctgtgaaaccgaaagtgatcttaatggatgaaccgacttctgcgctagaccctatttcgagtgctaaaattgaaaatatgttgctagaattgcgccaacagtataccattataatggtgacgcataatatgcatcaggcttctcgtatttcggataagacagcattctttttacaaggtgaattgattgaatacgcaccaacgaagaagattttcttaaacccaaccgaaaaagaaacggaagattacatcagtggccgttttggctaagaaagaagggaaaccacaatgagacgactttttgaagatgagttaaatgatttacacgttcgcttctccgaaatggggatgatggtcaacgaagccatctataaatctgttaaagccttcattaatcacgataagcaactcgcacgcgaggtgattgctgacgatcataagattaatgaacgggaaacggatttggaacgtaagagttttgagttaatcgcacttcaacaaccggtctcaactgaccttcgcgtgattgtcacaatcatgaaggctagttcagatttagaacggatgggtgaccacgccgtttcaatcgcgaaatcaacgattcgggtcaagggtaatacccgtgtccctgatatcgaaaaagatattgcggatatggcagacaaagttaaacaaatggttgaagaggtattggacgcttacgtcaaagaagatcgtaagaaggccatcaaaattgccgatgaagatgttgcaatcaatgcttattcagacaatatttatgacgactgtatcaaagaaatgcaacgtgattcagaaaccgtcgttgggagcatggactacatgttagttgcaagctacctcgaacggattggcgattacgtgacaaacatctgtgaatggattgtctacctcagaaccggtaaggtagtggaattaaactccaatgcacaagaagatgaattctaaacaattcaattaaaaattttaaaaagcgatgacaaggtcgacttgctcgtcgcttttttagtgggagaatcataatgcaaaaacaaatatacttagctggcggttggtttacacctaaacaggcctcattagtggaacgcgcacacgcggctttaaaacaaaacccaacgattggttatattcatagtccacaggagcatcaatacaagggtgtgacagaagatcatgatccagaaggcatgttcgggggttacgaatgggccaaccaaacgtatcaaaacgacatcacagcaatggatttagcagacatggcagttgtgttatgggatatgcaagacgaagatacgggaacggcgtttgaagtcggctacttgaatgcctgtcataaaccaatcgtctttgtttgtgaagatgatttacaagccaatcccatcaacctaatgttggctaaagggattacccaatgtctaaccagtgtggatgaattagcaacctttgatttccaatttgtcgccggcgaaccttacacaggacaaatcgtttaagcaaaaaagcgcaggacaaaaataattttgtcctgcgctttttttgttctcactcttgatacctaaataaaaatcaacctttggacctatgacaatcgactgtaaaatcggcataatagagtcatagtcaagtgaaacagtacaacgaatgatcaatggaggtcaaaacaatgaatgaacgtcaacgaattttagacttagtgaaccaaggtattttaacttcagaagaagcattagtcttattagaaaatttagccaaaaatgaccaagatgtaaaatcaaatccaactgaaacagcaacggagcaaactgaacaaccaaccgctgataaaagcgcaattgaagaaaagacacacgaattaaccgttaacctttccggcgttaaccggcagttgcaagatttgaagcaagcaatgcacgctgatcaagaacaagtcactgtccttgatacgatggaagatttagatagtttaagcagtgaaaaagcaaccgaacggcaaacactcaaggctggcttattacaaaagcaagctgaagtcgacgagttggaagccaaacgcgaagcactgacggatgaactcaaccaaatcgaaaaagaacgccgccaaatgaccaaaaatcaatggtcagaaaaattaggcttatcagatgactggaaagaaaatgccagtgaaacatttgatgaattgagcgataagttaggcgaagctagcacacactttggtaagttcgtgaagaatactgccaaaacagtcatggataatgtggattggaaagaagtaaactttaaggtgcctggtttggcaactgaaaagttcagccatgaattcgtttattctgacgtaacaccagaaatgattaacgtcaaagtggctaacggtagtgtacatttccaaatctgggatcgtccagaagtcaaagtcgcagcgcaagtgaagttatatggtaaaatggcagaagcaacaccattggttgcttttgaagcgcgcagtacaattgatgtgactgatgccgacttggtcttccaagtgccgaataaacggattcaagcggacttaacgttctacttaccagccaataactacttacaaacgaatgtgaagttattgaacggggatgttgaattagatggctttaccggccgggatatttacttgaagacgactaacggtgaattaacgttaatcagcaccaacgctgcaatggtggaagctgaaaacgtcaacggtggcattacctttgatcaaggccgttacgatgatttactcgcaacaaccgtcaacggtaacctattgattcaagcgcaagttttaaatgcgagtgtttcaacggtcaacggggatatcaagaacactttgacgacaactgatttacaacatctaaaagcaaaatctgtgaatggcacaatcaagacagctttaccacaaactttggcaatgactgttgatgcccgcacgcgttttgggatgattaaaaatcggcttgcaaacacccaaaccatcgaacaacggcaaagtacggggaatcaaatgttacaacttggccgtaacgacaatgaacaggcagctcgtttaacattaagcacgacaactggtaatattttattgaaagacaacgataactaaaaaattaaggaatggtgggttttaacaatggggaaaagactttataaatcaagagataacaaaatgatttctggtgtaatgggcgggattgctgagtattttaatattgatgcgacattagttcgaattctatatgttgtattctcaatgttttcagcagcgttccctgggattgtggtctacatcatcttagtgatggtgattccagaacggccacgtcagagtaaacatgattctgaaagtgaatggagtgagttttaatgccttttttaatgattttattagtcattatcgccattatggcggcagttggcgtgtttagtctcgtgattggctcgctactgttattattaaaatttgcgctaccactgattgtgattgggttaattgtcagcttcatctaccgggcaattgctggcccaagtagacgtccacggcatgcagactggtgccatgactaccaagactattcttatcaagaaacagcacatcaaggtagccgtcaacgcaaggaagcccgtgatgtcaaagtagacgatgatgactggagtgatttctaatgcggtattggacacgcgtaattgttgatactttgttattcattgcgatttctggcttattgcccaatttattctatgttgaaaacatttggatcgcgttagtcgccagcattgtgttatcgattttaaacatctttattaaaccattgttgaacttactctcatttccaattacgtttttaacattcggtttgtttagtgtcgtgattaacgggattatgttagaattgaccgctgttttcgtcggcgcccactttagctttacaagttttggagcagccgtgatcgtggctatcattttatcaattgccaatacgattattacaaatcaatttgtgagagagcgttattaaaaagttagcgggactgacgtcaattaagattgatattggtcccgttttttttgtttaggctttagaatatttggtcaatataaaaacccccgatattggattttggtccaatatcgggggttcacttcatcaattcagcgtgaatttgaccgtcttttttgtttgattttaaagtaatggcataatcattgtcgtccatagccagctcagtggcatgactaagatcattgctggtatcatgtctgcaattggaaattcgcgaattttagcaattctaaagccagtggcgagcatcaagaggccgccgcaagctttgaaatctgcaagcattgttggattcgttagtgggaaaatgagtttggcgagtaagaaaatgatgtaaaagataatgaattgcggaatcgcaatggttgaaacgacggggccaagattgcaggcaaagatggcagcagtaaagaaatctagaattgatttagaaattagaatcgtattgttgcctgtcataccagcatctaatgtcccataaataccggtcccaccggcacaaaagaggacaatcactgtcacgagtgctgaaataaattcggtatctgatagcgtattgtttttacgcggaaaaatttagaaattggccgttccatcaagacggcaccgcgatcaatccagcgaccgaagtgaatgagtaggccaatcccagtaccgagaacaactgcgaagatgactgcaggcatgttcttcatttgaataatggcattgatgcccattcccatcgaagcaacaccgaagattaaggtgagttctgttttaaatttagttgataatttatctcccaataaactaccgaatagaccgccaaataagacggataatgaattaataatcacgccagttggcattgagaagacccctttaattttaagtttgcatattcaaccataccaatttaaaagaaaagaagcaatttaattttaaatgttagcgcttatatatattcgatgggagtcttgagctagaccaaaaaacgactaatcatttgattagtcgtttttttactgactattcgaatcgcaaactaggcttaaaacgccgaatcagtgccttgggttggttataggcccaatgatttaaaacggcggcaatcaaaatacaggggacgatatccttttcttggttgacagtcaattgaaaggctggaccgctgcttgctagaatggtggtcgcttgcatgatgggttgtgtatggtagataatgcgatattgattttgcgttaaatctcccataattaaccaattaagttgtttgacatagataaactcatgccagacgccccagatctttttgagttgaccaatccgttcatcgttttggaaaaggtcaaagtcaggtgaggggctaattgtgacttggcgaatttcaccgagtaagtcgccggtgagtgagtaaaggctgaatacgtcatgccgaatcccacgctttccaataagtaaataacgcggttgttcttgatcgtcaatcacggttgagacaccacgtgaagcactagcctggtgtttaatgtagaaaataggcatcaaagatcacttcttttcagctgtacgattcaagtcaatcgcgtgataaatcgcttgtgcgacgccgtcttgaatgttagttgcagtttgatagttcgcaagttccttaattgttgggacagcattgcccatggcgacaccaatgccagctgttttgatcattgaaaaatcgtttaagttatcaccaattgccattgtttgctcaactggaatccctctttgttcagcataggcggccaaagcgatgcctttttgagcgtcaatgtggtttatttcgatgttattacttgaagaggaagttacaactaaatccccgcgggcttcacaaaatgccttaattggtgctaattcggtcattccctgtgtgctaaaagcgatgattttaagaatcttaaccgttggatcgttaataatcccttgatagtgatcatcgacgtagttaatattcattaattccaaacgggctgctgctaaagcaaccgcaattttataactcgtatcgggattgaggttgacgagtaaatcagcgacattttggatgcgactgactttgctatctgaataattaccggcagtcgtcatgagttcgaagtaaatattattttcgcgtaaattttctgtgacggctgtcaccgtttcggaatcaatcggcacattcaaaacttcattacctaaagaatcaaaaatttgggcaccattcatcgtaattaaagtaggttggatgtcatcactgtcaattagggggagggcttcagaacgactgcggccggtagccaccacgaattcgatgccggcgtcttgggcagctttaatggcggtcatgttaccgtctgaaacctgcattttgtcgtttaataaggtaccgtccatatcagatgcaataattgaaatcaaaggaattcctcctgaaaacgtattattagaaacttacctctatcttagcatgcaagctacttttcttctagcaacttatgttaaaacacgataaactagttaatgaggtgagcagatgaaaacaattattcacaatgagtggcaaacgattctcgcaccagagtttgccaaaccctattatggtcagctccatacctttttgaaacaggaataccaaacgaccacggtttatccagagatgcaccatattttccaagcctttgaatggacaccgtttgaacaggttaaagtcgtcattttaggacaagatccttatcatggcccgaaccaagcccatgggtgtagtttttccgttttaccaggggtcaaagtcccaccatcattgcaaaatatttataaagaattgcagacggatgttggctttcaaccggttcagcatggctatttaaagagttgggcggatcaaggcgtgttcttgttgaacaccgtattgaccgtgcgggcaggtcaatcaaattcgcatcgtaaacaaggttgggaacagctaacggatgcggcgattgctgcattgtcaaatcggggacatgtggtcttcattttatggggaaacgcggcaaaggataaacggcggttaattgatgagacgcaaaatgcggtcattactgcagtacatcccagtcccttgtcagcctatcacggtttctttggctctaaacctttctcacagacgaatactgcccttgagcaatggggcatggcgccaattaattggcaattaccacaaacagtcacggtagaataatgaagcgttaccattgttgacttgtcgcggtattagaaacgttgtatgattacattagcaataataaaatgcttactggaggttgcaattgtggatttatttgaaagcttaaaagcaaagattaccaatcggcaatttaaaattgtttttccggaaggaacagaaccaagaattattggtgcagcagcacggttgaatgctgatcggattttgaaacccattttaattggggcaacgaatgatattcaacaaatcgctgctgctaaaggatttaacttggacgggataacgattattgatccacaagaatatccaacagctgactttgaaaaaatggttgccgcttttgtcgaacgccgcaagggcaaggcaacccctgaacaagcacaaacaattttacaagatcctaattattttggcaccatgctggtttatttaaacttagccgacgggatggtttcaggtgccgtgcattcaacaggtgatactgttcgaccagcattacaaattattaaaacaaaaccaggtgtccaacgcacaagcggggccttcattatgcaacgcggtcgcgataacgaacgttacttattctcagattgcgccatcaatattaacccgaatgcgcaagaattggctgaagttgctgtggaatctgcaaagacggctgagttgttcgatatcgatccgaaagttgcgctgttgagcttttcaacgatggggtctgcgaaagcagacgaagtcacgaaggttcaagaagcagcacggattgcacatgaaattgcgccagaattagacattgatggtgacctacaatttgatgccgcatacgtaccagttgttgcgaaccaaaaagcaccagattcaaaagtggcgggtcaagccactgtgtttgttttcccagaattacaatcagggaacattggctacaagattgcccaacgttttgggaatttcgaagccatcggaccaattttacaaggtttgaatcaacccatttctgatttatcacgtgggagcaacgaagaagatgtttacaagttagccatcattacggctgctcaagcattacaaaactaattgaccgacaacaaagacgccagcacagaaaaattgtgctggcgtctttgactttgcgaacagggcttttttcggtataatgacacacagataacaattagaatgaggcagaacatgttagaatttaaaacaactgatccagaacaaacaattgcgattgccaaacagttgggccaacaagtccaagccggtgatgtcttgttgttggatggtgatttaggcgctggtaaaacaacgtttacgaaaggcttggcagctggtctgggaattgaccgctatattaagagtccgacatttacgttaattcgtgagtatcaagacggtcggttaccactctatcatatggatgtgtatcgattggaagaaacgggcgccagtgatttaggcttagaagagtatttcgatggggacggggtttcggtggttgaatggagtcaatttattgctgaagaactaccgagcgattatttgacgattcattttaataaggatgttagcgatgatcaagttcggacgttagtacttgatccgcacggcgctcactacgaagcattggtgcgtactagttttgcagactagtgtaattgacattcggcccgcgcaagcagcagatgcgcgggcttatttatgctttctaaaggcggtcgctaaagaaacaccgtatgttgcgttaccagcggagttagccactttaacaccattatttactgaatttttgatagcaagtattcttgaatcgcaacaagatgtattattgcttgcttttgatcaacagcaaattgtcggggcaattcgtgtgaatagtccgacagaacaggggctaacacatatcagtgaagttagtatcgctgttttaaaagcaaagtggcatcgcggaattggctctgatttgatggcgcaccttttagcgtcggttcgagaaataggaaatccgcgacggcttgagttaacagtacaagcccgtaatcaccgtgcaattgcactttacaaacggtttggttttgtgaccgaagcacaattagcagccggattttatgcgccagaaacgggctatattccggttgtgcaaatgtgccaattaatgaatatggatgaggagatttaagatgcaacaacaacgaggacgcggaatttacttagccgtattaggatcaatattttgggggattcaagggccagtatcacagtggctattcactgacacggcaattaagccagaatggctaatgggggttaagatggggctttcaggcctatttctattaggttatgcgctcattaaacaaccgaacgatgtttttacagtgtggcggcaaccgcgggactttacgcggatgttattatttgcagtattagggttatcggccgttcagtatttttattttctaacgattcaagccagcaatgcaccaacgactacgattttacaacagctaggcaccatcatgatcatcttaattagcttggtgatttatcgtagagcacctagccgcgttgaactaattgcagtgactgttgcattgttggggacgtggttgttagtgacaaaaggacaactgacacatttggcgatttcacacgcggcattcggacttagtttatgccttggcttttctggcgctttaaacacattaattccggttaagttattccaaaaatatccaacattagtgattgtgggctgggcgatgttaatcggtggggtggtcttcacatttgttcatccattttgggtcggtgttccaccgttgaatgtggcaacaatcagcagtgtcttattcattgctttgtttgggaccgcgctcgccaatctttgtttcttggggagtttacggtatatcacaccgacaacggctggtttattgaatacctttgaaccattagctgcgactatcggtactgttttattcttgaaaacgagtttcaacacctgggaagtcgtgggtgggattctcgtgatcagtacggtgtttatcttgagtcttggtcaatctaagtcaaaataagttaacacgatgaaccgaattgtggtataattaacagcgaaacaaagctcgtacattagtcaaaacaaattaatgattatgatgaagttgttaatcttgtcgaagccctaatgacaatttagctttaatccaccattcgctaaaagagcggttagcctgtctgcatagacaagttaaccgctctttttttgttagccgattaatttggtggccgcttttagcggttcaacgccaaaatcgttggcttctttaatcagaatcttggcacaagcgatactatcagccagtgcattgtggtgattgtcgagtggaatcgctaggttatcacacaaggtgtttaacttatgattctcaaattgcggatacaaccgccgactcgtcttgagagtatccaacgctaaataatggggttctggaatgtcgtagtgttggagtgtacttttcaacacaccaatatcaaaattcgcattgtgggcgaccactaacttgtttggcgtgaaaaatggtgcgatgtgcggccagacttgattgaacttgggcgcttgagccacatcggcttcatgaatgccatgaatttgcgtattgcgactgctaaaataagtttcaggtttaattaacgtataaaaactatcaacgatttgatcgttgcgcacaacaacaagggcaagtgagcaagcactatgccattgaccgttggcggtttcaaaatccattgcgacaaaattcattattttgaacctcgctttttataaagtttgcttattctaagctaataaatcttgcgtgtcaagttcgacggggcagtggtcggaaccaaaaatttccgtgtgaatcttggcatcgactaatttaggttggagatcattggaagtaatgaaataatcaatgcgccagccggcattattgtcgcgggcgtggaatcgataactccaccaagaataaatatcgggttgatcaggatagaaataacggaaggtatcggtgaagccgcgatttaagagggttgtcatttgccctcgttcttcatctgaaaagccggcgttatgatgattggtcttatcatttttcagatcaattggttcatgggcaacgtttaaatcaccgcagaaaatgacgggtttttgagtcgataaatcagcgatataagtttgaaaggcattctcccaacgcatgcgatagtctaatcgtttcaacttatcctgtgaattgggtgtgtagcaagtgattaaataaaaagtagggtattcaagtgtaatcacgcgtccttcttgatcgtgttcaggttggccgataccataagttgcagtgagcggtttatgcttagtgaagatggcagtaccggaatagccttttttttcagcgtaattaaagtattgatgataacctggtaaatctaattcaacttggccggcttgcatcttagtttcttgtagacagaaaaaatcggcatctagttgattaaaagtggtcataaagtctttttttaaaacggcgcgtaagccattaacgttccaagaaataaatttcattgtcgatccctcatttctaaactccattttaacggtctagtcaataatacgcaaaaaaagtgttggctgttcaattcaagccgtctttgttaaactaggagtagattattttttgaggggaacgacaattgtgacaagtcaagttgaagtatttttacaagcaaaccaagcaatcgagattcatcaagcagaaccattgagcttatacacctttaccaaaacaggtggaccggcagatttactcgcactccccaaatctgttgcagaagtgcggcaattagtggccagtgccaatgaactgacattacccatcacaattatcggtaatgctagtaatctaattgttcgtgacggtggtattaaaggcttagtcatcatcttaacggcgatgaatcagattaaagttgaaggtaacttggtgaccgcgcaagctggagcagggattattcaaacctctgaagcagcttatagcggtagtttgaccggcttagaatttgctgccggcattcctggtagtgttggcggtgcggtctttatgaacgccggcgcatatggtggcgaaattagtgatgtactgacccgcgttgatgttttaatgcgcgataatcaagtacagacgttaacggccgctgacttagacttcagttaccggcatagtttaattcaagataacggcagtattgtgttggttgcctattttgaaatggcaacgggtgcggcaccaacaattcgcgcccggatggatgaggtcaacgctttgcgggctgccaaacagccgctagaatatccctcatgtgggagtgtctttaaacgaccagtcggtcattttgtcggaccgttgattcaaaaagcgggcttgcaagggcatcaaattgggggcgcacaagtttctaaaaaacatgccgggttcatcgtgaatattgatcacgcaacggcaacggattatttgacgttgatcgaatacattcaaaaaacgatctgggcgaagtttaatgtgcgcttagaaccagaagtccggattattgggcaacataagcaaggttaaatcaatgatgaaaagctatggtaaaagatgattttatcagggcttttttatcaggatgagcgttttaaaaagaaagggtgttgggatggcaattattgaagctgttattttgttaattacgttggtgattattgcgaatatcatcgggcattatttgccaaatttaccggttagtttaattgagatcgggttgggattaatggtggcgttagtctttgccgtcaagattccactaaaaacagattggttcatgttggtgtttgttgcaccattattgtttaacgatggccgtcgttttcctaagaaggaactatgggcgttgcgcggaccaattattgggaatgcgattttcctcgtctttgcaacgacgttaattggcggcttggccattcattggttagtcccggcgttaccgctggctgcaagttttgcgttagcggcaatcttgtcgccaacggatccggtggcggtacaatcgatttcagaacaggccgatttaccgccccgggttttgcacttagtgagtggtgaaagtttaattaacgatgccagtggcttgattagctttaaatatgggattgctgccgctgttaccggctatttctcatggcaacaagccgcgggcgattttctgtatattagtattgttggcacactagcggggatgattatcatgttaatcattcattttattcgcctatttatgctacaacaaggctttgaagatgtgatgttccatacgattttacagttggtgacaccgtttatcatctatctaattgttgaagatctattccacgcatccggtgtgattgcggtggtggtagctgggatcatcagtcattcatcacggaatatcttcctcgattttttaccggagttgaagttagtgaccgaacaaacttggtcaatcagtgtttacttattaaacgggattgtctttttaattttagggattgaattacctgtcgctatgcataataccgtgcataatccgctgattaatacgagtgaagaaattctcctcgtcttagcggtttggttgattctggtgattgtgcggggactctggacactagcttacttgctctacaccaaccagacgaatcccaaaacattccgcgaaaacattaaaattgcggtgctctctggactttctggggttcgtggagcgattacgatggccggggtattatcggtgccaactgttttagcggatggttcaccgtttcctcaacgcggcttaatgctctttattgcggccggcgtgattattgtcagtctggtgatggccgttgtcttaattcctaagctgacaaaagtcaaagcaccaatcgagatgcgagggatgcaacgagatcttgaagccgaagcagccgcagaagatgaagcagctgctgatttattggatgaaacaaacgctaagatttacatgtacaaagtagcagcgagcatggtcgaatcccaacggcatattgataataaccgggctgctttagatttattggcagagtatcagttgatgatccgccggttggagagtcaacaaagcgaagcaagcacaagtgacgaactaccaccgttaattgctgaagagttgattttgcgacaagtggcatttgacggagaacgtcagaagttagagttgttatgggctgaaaaggccattagtgctaaaagctatcggcatggtaaacgtaagttacggcaaaaacaagtaatgttatcggttattgggacgagttttaattggcatcatgtgcaactacaagtctatcgtgcttggtcaatcagcaaacgctttttgatgcatctctggccgcggcataccaaatcaccaagtgaaaccgagtggcaattgactgaacgtgaaatggctaaggcgggaattaaacaattgtcgtatttcctaaaacagcctgaaaatcgccaacgtcattataatcgtcaggttatttatcaaattattgtgcggtatcggaatcagattgaaaacatgaaaaatggggggcggagtaagaccgctatctatgaacgtcaattacaaaaattaagaatcaaagcgctcacgagtgaacgagtggcgattcaagagttattggaacaacataaaatttcatggcaacttgcagatgaattacgcaaaaacattaactattccgaaaatgcactgattttagcacgaacggatactgaatagattcaaaaaagccccacgcactcattttaaattgagtgcgtggggctttttttgatggttagaataagtggcggcggcggtagtatttgtagctgtaataaccaccaattgcaaagccggcgctgattagtgaaatcgtcaaaccccaatagaaataaggtggccagtatttaagggtaacggtatggtgaccttttttcagcgggatggcgatgaagttcttcaagccgcgtttgattttaaccggatggccgtcaaccgttgcatgccaaccagcagcataggggacggttgtcatgaggacttggttttgttgaggaatggtgatcgttcctttgatggttgtgtttgagaaagtattcagtttcaatgcatgtgcacgaagttgctgcgttaggtgcgtcaatgcttgataattcaaactatataaattaatattttggagccaaatttcctttttagagaagctaaggtcaacggtttgttgttggccgattgcgttacttgtcaggtttaagacgacagtatcgcggaaagtatcgtattgttgtagcgtgtgaccgtttaatgagacctgaaccgcatttttttcgaggtttgagcctaatgtgaggtaataggggtcactcgttgtgggtgtgaaggtatagatgacgtgagctggattcttcggatcaacccggaggaaagtttcgttgagttttggtttttgtttagcattcttgtaagtgacagtattgaaaaattgaagtgtgaagagtggctgttctgtcgctgaattgactaagtctgccgcaatctggttctgttcaaggatgggataattggcaaccacatgatgtttaagcactttttcagaggccgcaaagcctaaatcaagtgcgttggggttttgataaattgcaatttgatctttttttttgagtaagttataacgtgctaagtccggcttattcgtactgagtggaattgttgcttgcccactagtattgttaaggtagtagcgataacctaataacgcatcggtgaacagggtctgattagtatcggcaacggcgccatcgccagctggttcgccaatgctgcccatgaatttcggatagctcagttcgagcatcgaattaaaatgagatccgccgaaataatcagcttgcatcgggtcattttttgtccgcataaaggttttgccaattcgttgaaacgcggttttatttggaattgcgctaatggctgattgtaaatgagctgtataatctgcgtaatctttttgtgagacatagctaatttgattaagactcattgtcgcgttggtgaccatctcaccaccgacgcatagaactaagagcaaaggataatagtgcttgagcggctttttcaggagtaaaagcaagcatgtcatcagtaagaaagcgatgcttaagttaatctgattaggacttagcgcggtgaagctcttgagatgtttggcagtataaccaaaagccgccatcaacattaaaaacggcaacaagagttgataccaactaaatcgggggtgctggtggagccgttgaaccgcgagcacgattagccaaaagctaaccacatatgaaaagcggtaaggataccaaactggaaattgcatgccgtgccataataaatcaaggggttcataacacattgaaacacctaagaaaatggtgactaataaggcaactaaccgttcttgccaggcgatcttgcgtgttccaaaatacaagatggcacaaatcaatacgagactgccgacgaatatattcggttcgccttttggcatttggtcgaagttaaaattgccaatcacaagtttagaaagcatcttaagcggattatattcgaacttccaatgaatcttttgaatggtgtactgccctttgctctgcgtcaattggaaaaaagttggcaataggagccaggctgagagtaaaccggccaagagtgagccactgatgaagcgggcagcgcgttgccatagatggcgccaagtttgccaataatgagcacaagcccacgcaaaataagcaatgacaaacaggcaaaccatatagcccatataatagttactcattaagagtgcggcaagactcaatggataaagccaaaagtgacggcctgtaaagagccggtcgatgcctaagacaactagtggaaaccagacgagtgcatccaaccacataacgttaaactggttggcaattgcaaacccggataaggcgtagacaacactaagtgtcggtaaccaccagctatggagtagtttgttagattttaagtagtacgcaaagctaagaccactggcgcctgttttgaaaaggacaagcagccaaacaccaaaactcaaccaagttcctggtgtcaataggacgattagattgaatggactcatcaaatagtaagcccagaccccaagcatgtcgccccctaagcccttagcaaaggaataaaaaaaagtttcgggatggtgcaatagcgtacttctgaaaaaagcgtaaaaatcgatgtattgttggcctagatcaacagtcaggattgtttgccctccaaaagggaacacttgtcgaagtagtccgtagataaataaaatgccaaatggtagtaagaaactaaggcctaatgtataatgacgacgtgcaaaagcgtaaaatcgactcacggtaatcctccaattaataaaaaaatctaaaaattaggttgctagtccgtttttaactgagaaaagctgtaaaatataaccagttaatgactatgcttaagcataccataatctcgtttgaatttagagatttggcatagcttgtttaagataattttgctaaacttaaacaatacagcacaaaatcgctcaaaaggtcgcttggcgactttttgaagcatagagcggcgccatcttttactagagcggcgctaaataaggagtatctgaccgtctgtgaaaatcattaagagaaaaaacaaacaaaatcgtgaaaaatcactgattccattccgcctaaatttcctattattcgttgtcttcgcgttatttgccgcgttgattatgcaattgggacgcctgcaagtgatggagggcgctaattttcaagcgatggtcaacagtactgataagaaaatcgttacaggtaacgtgcctcgagggatgattctggattcaaagggccgtgtcttagttgggaatactgctaaaccggcgattacttatacgaagaatatgaatgtcttggcagacaaaatgtatgcagaggccaataagttaacccaatatttaacggtcccgacggataagttaactgaacgtgatcagattgattactacctcagtaaccccaagaatcttaaaaaatggaacgcaaaactgcttaaatctgcgaaggttgccagtgatggttctgagttgccagaaaagaaggtttatcaatcaacaatcgaattggttaaaaagtcgtttaaagggttaaacgagcaacaaaaacaagccgctgcgattttcaaaattatgagtggggcttatcaattatcgacagtttatattaaaaatacggatgtgactgataaggaaattgctgaaatcagtgaacatctaacgagtttgccaggggttaatgtcagcaccgattgggaacgggcttatcctaatggcgattcaatgcgcagtattattgggcatgtttcaactgaagagcaagggttaccagaagatggcgtcaactccttgctagcacagggctattcgcgtaatgatcgcgttgggaccagttatttagaaaagcaatacgaaagtgtcttgcatggttctaagtcgcaatcacaagttgaagttggtgcgaataatcagattctctcaagtaatgtcttatttaaagggcaaaaagggagtaatttaaatttaacaattgaccaagcttatcaaacgcaagtggaagcggctttgaagaaaatctatgatcaggcaaaagcagcgggagccactcagtattctgatggtgcctatgccgtggcgatgaatccgaaaacaggtgctattttagcaatggctggcgaatccaacgatcgtaagtcaggtgaaattgccgatgatgcgctcggggtgattaatcacaccttcgtcatggggtctgctattaaaggggcgaccgttatggggggcttaatggatggtgtgattacgccaaccaataataccttaccggatacaccaatctatttaagaggaacgccggttaagaaatctgtttacccagttgggacgtttggatcattgaacgctgaatcagcgttggaagtttcttctaatatttacatgatgcaattagcgatgttagaagggcatgccaaatatgtacccaattcttcgttaacgatggattcagatatctttacgaagatgcgtggctacttcagtcaatttggcttaggacaaaagactgggattgatttgccaggtgaagccaccgggatcgaagggccaaccgtcaatgaatatggcgagccagccaatggttcattacttgatttatcttatggtaactacgatgcctacaccttaattcaattggcacaatacatttcaaccatcgcaaacggtggtcaacgaatgaaaccataccttgtggattcgattcaacaaactggtaacgatgggtcagctggccaagttggtaccaagaccacgccgacagtgcttagcacagttgatgcgcccgaaagttactttaatgtcgttaaaaaagggatgtacaacgttgtcaatgggaccaacgcttgggggacagcacacaccttgaaagatattaaaccaacgcttggcgctaaaaccgggacggcacaatcatttgcccgtgaagatccaaacgattcgacaagtaagcaagtcgaaaccgttacttctagtttggttggctttgctccatacgataatccgcaagtggcaatcgccattgtgttcccgaacttaaactctgataaagggcactacaatacgttactagcccgtgaaatgattacgagtttctataaattaaataacattactgaatgaaatattccaaaataaccttttcagataccataaaaaatggtatgatactaagagtctaagaattaaacagttttttagaaatttacttacagcttggaggctatatcaatgcgtgttcacattacaatggaatgtacagaatgtcacgaacgtagttacttatcaaacaaaaataaacgtaacaatccagatcgcttggaattaaagaaatattgcccacgcgaacgcaaagtaactttacaccgcgaaactaaataatagtgacgcacatcaaaagtcggggcgcttcgcgctcgggcttttttttgttaaggaggcttttgaatgcggactaaaaagcaaattcggcaacaacaaattgcggcattacaaacgcttgcgcagacgcctgcgcttaaacatgcccaagaagcacaacttttggaattgttaatggcaaccgaggtgtttcaaaaggcaacaatcatcggtgtcacgttgagtcagccaattgaaatggcgacccagccggtaattgatgccattcgtttggccggtaaagaagttgtagtgcccaagacattgccagagcgacaaatggctttttacccgttaacggcaaccactgaattaacaacgagttcctatggtgctttagaaccagtggttacagctggtagccaggtgttaatccctgatttaatgattgtgccgggactagcatttagtccagaaggttggcgggttggttttggtggcggttattatgatcgttatcttgccaaatatccaatgccaactgttgcactagcgcttaaaccacaacaacgaagtgctgattgggccattgatgaattcgatatccaactcgatcaggttcttcaggtctaaaggagaaaagatgactaattttaaagaacgttggcaagacgcaccgattgtggtgtatgccttgatgttactaatgattttgatgtttgcaatgatgtttttgaatccggttgtatggttgaacggctttacatcggttaacatgctaatgaatggccggattattgggtttatgatggcatctgtcaatcatggccggtttatgaatctcttcgtagatttggttattttgttttttgttggtggacaacttgaacgattattaggacactggcgcctattagctatctatatactgagcagtttggcgagtttgtttacaacgggcgctttttttggtctcgatacaccaaccgtgactgctggaacagctatcttagggctattcggtggcttcttgatgttaggtgatgcctttaaagaagaatccgtgctaggacaagtggcacgccagtattggctgtttttatttttaacaatcggattacaatttattgtcgatcacaatgcattgtacgcaatggtaggtggggtacttggcggctttttaagtagtatggcgctgggtgcacctaaagtgggtaagattaacccgctgaaccgtgtggtgagtgggttaatttatgttgcaacgatgattttatttgattttctgggtatgaatcattaatcaatttatgtataatgttaaaggtgaagttgatgagaactctatatgatgtacaacaacttttaaaacaatttggcgtttacgtccatcttggtaaacgactttgggatatcgagctcaccagtatcgaattacggcacgtttatgatgcggggttaatcgatggcaaagtgtatcgtgatgctaaaatggttttagtgcgtgaacatcggttggagaaaaatgaagcgtttaatcacaatttattggaggagaagtttaaatgacagacaagaagttaatcggcgttgatttaggcgggacaactgctaaatttgcaattatgacaatggatggcgaaatccaacaacgctggagtatcgatacggatattttagatgaaggtagccacattacaccggatatcattgaatcgattaatcatcatttagatttatataacatgacacctgctgatttcatcgggattggtatgggcacacctggtagtgttaacagtaaagaagggaccgttattggtgcttacaacttaaactggaagacaacccaatacttacgtcgcgatatcgaagctggcacacacatgaagcttgcaattgataatgatgccaacgttgctgctttaggtgaacgttggaagggtgctggtgaaaaccaacccgatgttgcttttgtcacacttggcactggagttggcggcgggatcgttgctgatggccatttattacacggtgttgctggttctgcaggtgaattaggccacgtaacagttgaaccacatggttatgaatgtacgtgtggcaaacaaggttgtttagaaacttatgcttcagcaaccggtgttgtgcgcgttgcacgtgacatggctgaagaatacgctggtaattcaaaattaaagacaatgttggatgatggtgaagaaatcagctctaaattagtttttgacatggctaaagaatcagatgcattggctgttaaggttgttgatcgtgtttcttactaccttggtttagcattagctaacgttgggaacatgttgaatcccgcttacatcgttatcggtggtggtgtttcagctgctggggaatttttacgtaaacaagttgaagcttactttgaagaatttacattcccaaatgttaaaaatacgactaagattcgtttagcaaacttaggaaacgtagccggtgttatcggggctgcttcacttgcacttcaatttgatcaacaataatttgttataagggagtcttatcgatgcttgtattagggacaattaatgtatgggtagtaattaatattattctgatcgccattttactttggttcttgggcgattgggcatattatcaaattcaacgcaaacgcttaggcggcgaattaacggaagcggcgtttgaagaaacaatgcgcaaggcccaaattgtcgacttacgggataaaaaagattttgatgcaggccacattttaggcgcccgcaacttaccttatccaatgttgaaacaaaatatgggtgaactacggatggacttaccagtctacttatatgatgcaggcattacgctcagtatccgagcagcactgaagttaagaaaagctggtttcaccgacattaaatggttgaaaaagggttatgctggttggaccggcaaaacaaagcgtaaaaagaaattaaattaaaccaaaaaagcccaagagttactagcgaaaaaaactagtcaactgttgggctttttatagagtgcgcaagcagatggtcatactctgaggattagtggcataccgtaaatgagcggcagagccgatcgtttgcggtatgtaactaaccgaaagagtatatctggcggcgcacgtttcaaaacagagtgcgtttaaagcggtttgactctgagcattagcatagtgttgttaatgaccgacaaagtcggtcgtttgcaatacgaagctaatcccaagagtcagctttaaaaagcacgtttccacaaaaaaagtccgtcgccaatcaggcaccggacgcagtcttttcaaagcgcttagccttggtgagctgaatggctcttacggttagcacgtcgacgactttcttcaatttgattttctttttcttcgattggatcaacgacggtcttcttaaatgccaagagtgaaccggcaatcgcgccgactgttgaaacggttccgattacgaaaccttttagaaatttatgtttcataggtaaagcctcctcaagtctcaattcattcaagtacaactttattatcgcgtatttaagcgcgaatagctagtaaaatacgttaattaatgtggtgaaaatatggaaaaagaaaagctaatcgtcattgttggtccgacaggcgttggtaaaacagcgttaagtctacaactcgcacaacagttgcaaggtgagattatttccggggatgcgatgcaggtttatcgccagttagacatcggtacggccaaagtcacaccaaaagagcaggcgcttgcgccgcaccacttaattgatgtggcggatatcgatcaacgcttcactgcctttgactttcaacagcaaggacaacaactcgtcactgaaatcgtcggccggcaacacatgcccttggttgttggtggaacgggactttatttgcaggcgttactgtacgatatgaccctgggtagtgcgcaagatgcggaacagaattttacgattcgtcaaaaatggcaaacttttttggatcagcattctgaagaagctttgtggcagatgcttaatcaaattgatccgcaagcagccgctaaaattccgagtgcgaatccacggcgtgtggttcgcgcattagaggtttatgaaacaacgggaactttgttttcacaacaaaagccaaaagaattacgttatgatacgtttattattggattgaattgtgaccgtgcattattatacgagcgaatcaaccagcgggtggatcaaatgatcgatgctggacttttagaagaagcgcggttggcttatgcacatcgtgaaacgagtccgcaagccgtgcgggggattgggtataaagagttcttcccatactttgatagtgactgttcattagacgtggcaattgctcaagtaaaacaaaattcacggcactacgcaaaacgacaactaacgtggtttagaaaccagattccggtcaattggtataatctggttgaacaacctgaagccgatttggctcggattcaaaccgatttacaacaatggttacagcaataatagaaatggagtggttaaaaaatggattggcaagcaaacttagcaccagaattacaagctaaaatcgcagcagttgatacgcaaatcgcaccgcgtttacaagcactggatgaacaaatcatcaataatcaagcaaaggtgctcgaagcgtttcaagcagaaaatatttctgaatcgcatttaaacgggacaaccggttacggcaacgatgatcaaggacgcgataagttagaggccgtctatagtcacgttttcaaaactgaagatgcgcttgtgcggccgcaattggtttccggcacacacgcgattggaacggccttattggggatgttgcggcctggcgatgatcttttatatcttacgggcgaaccatatgatacgttgcaagaagtcatcgggatggccggtaacgggattggttcactaaaagaattccaaattggattcgattttgtgccattattagctgatggtgccgtggattttgaaacggcccggaccaaaattacagctaagacaaaagtggtcgctatccaacgttcacgtggctatgctgatcgcgatagtttcacggttgataaaatcaaggaaatgattgcctttgtcaaaaacattaaccctgaattgattgtctttgtcgataatgcttacggtgaattctctgaaacaacggaaccaacagaattcggggccgacgtaatggccggttctttaatcaaaaatgctggtggtgggattgcgcaaacgggtggttacatcgtcgggactgaaaaattaatcgaaatgattggttatcgcctgactgtgccaggtgttggtgccagtgaaggcgccacacaaggcaatctgcaattgatgtttgaaggtttcttcttagcaccaagtgtgactggtaatgcgattaagggggctgtttttgaagcagcgcttttggaacaaatgggcttgagtgtctcacctaaatgggatgcccctagaacagacttgattcaaacggtgaacttcggtaatccggatgatatggttaagttcgctggttgtgttcaagcgcaatcaccaatcgattcatttgtgacccccattccaagtgattttgccggttacgaagatcaaatcgtaatggctgccgggacctttatccaaggtgccagcatcgaattttcagcagacggcccattgcgcgccccatatacactttacttacaaggtgggttaacttacgcgcacgttaaactcgcgattagtcgggcagtccaaacaaccttctttgaaaaataaatgccaagcggtcaatcaaatttgcgtttgattgaccgctttttttgtgcgttaggcatggtatgataaggatgcaacgaatcgtagtggtcggttttaagagatgctttggattgttgctagtataaatgtgtcattctcgctacggtaagtcttggaggtggttagatgttaattggtcaacaattaaaacaatttcgtttggatgcgggctactctcaacagacactcgcagagcagattaatgtgtcacgacaagtcatttctaaatgggagacggataaaagtgcaccagacttgaatacattggttgttcttgccaaattgtataatgtaagtttgaatactttgctcggggttgaaacggtcactaaaccgaattcattctttgggcggttgcggcaacattggcatttggcagaaagcgaaaatacaaaaccgctgtccgatttaggacggattatgcaacaacccgaacaacactatgtggatttagcacaacagttcagtgtcactttgacggatgtaactgttactagtgatggccaaacaatgccagcgaattggcggcaagcacggagtccttatttaattgtattagaaccgcgccaaatttgtttaaagcagacagatgttttaaaagtcatgcccgcaaaagttgttaagcaacttgcgacaacggaaattcgaacaattcattatgcggtcatgcagactgctggaccatcaaccattggcgggttacaagggtatcgggcacgcttatcgggccatcgtgacggttgatacaaagcaatccgtagcaccatactatattaccaaccaggattttcttcagttggcaaaagttctgaaagcttatgcacaacaggaacacgttcaatttgatgatcagatggctttgctgccttattttatgacgcatgacacaactgactgctttaattatttagaggtacattacagcgaattagcggaaaaagttggggttccagcagaaagcgcaggacaggcggtttatcgatggtagatgaaacagcaaaaaacaactttgaaacggcgacagatggggttcaggcttatcacaattattttggcacgccaacgcacgatgatcgtatttggtttgaactcttaacagttggggtcttccaagtggggttgagctggaaagtagctgcaagtaaaataccagttctgcgacaacaaatggtggggatggtgattgatcaagtcgcacaatttgatgaaatggatgttgaacgcctgcaaaaagaaccagatatgattcgtaatacgcgtaagattcgggcaacgattcaaaatgcgcgggcaattcaagccatccaaactgaatatggcagtttttcagcgtatttgtgggcgtttgttgatggtcagccgcaattgcttgattcacaaatggctggcgtgtccgataaatcagcgccgatcagtacgcaacttgcgaaagagttaaagaagcgccagtttaaatttgttggaccggtggtaacgcatttgtttatgcttgcaggtggtttgattcaaatcatcgatgaagactaatgcctaaaaggtaaaccaaattggtttacctttttttgttggctgatgttagaaaatctgacatcaaatgttgaccgtttgaaaggcgactggtaagataaaacgcaagtgaggtgaaatggatggctgaaaaacacttaaggcgcaacttagcagttttaccaattggtacggtaatgaaattgacgggacaaactgcgcgtcaaattcgttattatgaagcacaggcgcttgtttttcctgaacggacaacgggccatcaacggttgttttcgttgaacgatgttgatcgtttgttggaaatcaaggattacctagctgaaggcaccacgatggcacagattcgccagatttatcagaagaaggcggatcggcagcgtgataaacaattatcagacgaaaaagcgcggcggttattggccaatgaattattatcggtcggcggcttagttggacaacagtcaaccatttcacaatcatctaaattatattaaggggcgacggattaatggcacgtaaagtattgacagcagaagcaatcaagcaattagtggatcaagaaaacgttaagttcttacgtttaatgtttacggatatcaacgggattatcaagaatgtggaagtaccaattagtcaattagataaagttttaagtaacaaaatgatgtttgacggttcttcaatcgacggttttgtccggattgaagaaagtgatatgtatttgcggcctgatttaagtacatggctcattttcccatgggaagcggaacatggaaaagtcgcgcggttaatctgttctgtctataccgcagatggagaaccattcttaggcgatccacggaataatttgaagaaactagtgcgcgaaatgcaagataaagggttcaaagactttaacattggaccggaaccagaatttttcctctttaaattagatgaatacggcaaaccaacgttgaaactcaacgaccaaggcggctactttgattttgcccccgttgatttaggcgaaaactgtcggcgtgatattgttttggaacttgaaaagatgggctttgaagttgaagccagtcatcacgaagtcgcacccggacaacacgaaatcgattttaaatacgctgatgcagtcgatgcagcggataacatccaaacctttaaattagtcgttaaaacaatcgctcggaaacatggattacatgcaaccttcatgccaaaaccattacacggtgtcaacggctctgggatgcacattaatatgtcactctttaatcaagatggtacgaatgccttctacgatgaaaaaggtacagaacaactttcagaaacggcttatcatttcttagctggcttattgcaacacgcacgcgccatcacggcaatcaacaacccaacagttaactcttacaaacgattagtccctggttttgaggcaccggtttatgttgcatggtctggtcataaccggtcaccattgattcgggtcccacaatcacgcgggttatcaacgcgtctcgaactacggagtgttgatccaagtgccaatccttatttagcaatcgggtcgattttggcagccggtttatctggcttagatcaagggctcttgcctgatgctggtgtggatcgcaacatctatagcatggacgaaacagaacggaaggaaaatcacatcactgacctaccatccacattgcacaatgcattgaaggaactagccaaggatgagattatcaaagattcaatggggccttatctctaccagagcttcatggattctaaatcattggaatgggcagcttatcgtcaacaagtttccgaatgggaacgcgaacaatatttggaactctattagtcgcaatttacgccatgtttttgtacaattaaactttagaaatagaaagttggcagagtatgaaaacattggtgattatcagccatcccgaaattgagacgtcgatggtccaaaactttttaaaagcgagtgcagcaccactggaagccatcacttggcaccacttagatgcgcttgagacgttagatgtggctgctgaacaagcattattacgcaaccatgagcggattatttttcaatttccgctctattggtatgctgctccagcgagcttaaaaatgtggttggacaccgttttaacggggcaatttgcctttaatggccgccaaccattagccgggaaaacactcggggttgtcgtttcaactggtacggcggctaaacattttcaagctggcggcagtgaacaagcaacgctgtctgaaattttgcgcccatatgaattggtggctcgtaagctagggatgacctatttaccaccacttgcgattcatcaattgggttattggcaagaaactgataaacaatgcttggtcatcgattatcaacggtatttgacgcaatccgagttcaattttgatcagcaattagcgtggtttgaagcgatgctgactaaaaaggctgctgaagccacatcgcctgaagcgcaacaacgtttaatgcttttaagcgaacaattcgccgacaaacgatcggaattaaccgatttgaattggcaagtccaactgattcgcgaagaagagggggaaggctaatggattggttaacagaacaaattcaactacaaaaagaacaagccacaacgtatgaagagcaagctttttatacggcgcttcaacaaacgagtgatgaactagcattacggattgaacaacgccaaggtgaacttgatggtcgaatctggaatgcaacgaattggtaaactaatacaaaataaaaaacgccgcgacgaaagtcggggcgttttttatgtaattcgattaatagcgtttgattaatgtatcgaaagcatcaacgattgcttggaagaaaccaagtgtatctgggtttgtgatttcttgattgtcatctaataagttcatgacattgccgatataagcttctggttgttgaaccgttggcatgttcaagaaaacaagtgattgacgtaagtggtggttagcaccgaaaccactgattgcaccaggtgaaacgctgacgatttcagctggtttgttatcccagatgcttgcaccataaggacgtgaaccaacgtctaaagcatttttcaatacggctggtactgaacggttgtattctggtgtgacgaataaaacggcgtccattgtcttcattttatttctgaaagttgtgtaagcttctggtacttgatctaaatcatcataatcttggttgtacaatggtaagtcaccaatttcaacaatttctagattataatctgatgggaataatggcatcaatgatttagcaactgatttgctaaatgaatctttccgtaaactaccaattaaaactgcgatattttttgtcatagtgaaacctccaattgttttacttattattagtaagtaactttagtatagcacgttcccctgaaaaggcaaccacttttacttactaatttaagcatagcgaattggtgaagcttttagcaaacaatatggtcggccattgattggcattggcaagctataaatcgtataatagcagtaagtagaacaaagatgggaaatgaataatggaaattaaatggcacgtcaatcaaccacaatctgttaaacaattcttgctagcaagtggcatcagtcaacgattgtacgccaaaattaaggcgttaggccaaccgattctagtaaacgggcaaaaaagtgcgcctagtgatcaggtacaatgcggcgatgtggtcacattgcagttaccagctgaaccggccgatgaatcagttgctgttagtcacgaaccaatcactatttgttatgagaacgagtattggttggcggtcaataaaccagctggcttggcaacgattccgggtcccactaatcaaacggatactttgttgaatcgcattaagggttactggcaagcgcagggtgcaacagatttagtaccgcatatcattacgcgcttggattttgatacaagtggaattgttttagtcggcaaacaccaaattgcacaaagtctattgcaaccgcagattgaacagcatcaattacaaaaattctatttagcagttgtttcaggaacgggtttaccagcatcaggggatattcgtgaaccgattggacaaatcgaccatcaaccgcgacgtgcggtgttggcggatggtcagtcagcttggacgagttattggcgcttgggtgcatccggtcagttgacggcggttaaagttcagattcatactgggcggacgcatcagattcgggttcacttcagcgcgttaggctatccattggtgggtgatcagctctatgatgggccgcttgatttagggataacgcgacaagcattgcacgcgtatcgactgcaatttcaagatccattcagtcaacaatcaatctcgattacagcaccgattgcagccggtatccaagcgattctacctacagaacgattaccaattgattgattcaaaggaagatgacaaatgaaaaaatggcaatggttactaatttgtatcttgtgtttcggcattggtggggttatcggtcatgtagcgactggtccaacaacggtgctatcgattattcagccaacttcggccaccgcaaaccagcccgttattttcgtaccggggagtaatggaacagttgaagggtttaatggcacctttgctaaattgaaccgtcaagccacacgccatgttttaaaagtaacggtattaaaaaatggtcacttgaaaaccagtggtcgctttgatcaaaaaacacaacaccccgtgattgtggttgcgtttgaaaacaatgcagatggtgatgagaacgtctttaaacaatccgaatggtttaaattggcagcaggtaaattagctaaacaataccactttacgcattttggtggggttggttattccaacggtgggcttgtattaacgcggtatgctgagcgtagtggaagtggaccgaagattacgcgattactgacgttgggaacgccatataatggcatgtcggagcacatcactcaggaaacaccgatgttagctgatttaaagagccgccggcaacatttatccaaagacttagtggtctattcagtcggcggcacaattaacgataagaatgatgggattgtcccagcagcgagtgttgcggctggtcggctcatttttcaaaagcaagttgctgattatatgacaatttcggtgagccagcaccatgcagcccatactgaattgccggataatccaaccgtcatttcactgattcaacaattgatgtttaaataaaaaaaggtgtgtcgcagcaagttgagctgtgacacacctttttaatactattgatcgattgttttcaagagattccgcgtgatgagcattcccatgatgaagattaaaatttctgttaatgggacactcacccaaacaccggttaatccgaaaaggctagaaagaaccaagacgctcgcaatcaaaacgatgtagccccgcatgatggccacgaaaaatgacaatcgaggttgcgcaatggcggtcatgaataagttattgacgatgttcatgcttgagaagaaaaaactaatgaaaatcaagggaatgccagcagacgcgtagcgaatcagttgttggttgtgttcatggttaaaaatttcgatgatcggtaatttaagaccaatcaaaacgagatataatcctaccgcaatcccgagtgcggaaagcaaaccgattttgagactcgttttgacattatcccaatgatgtttcccaaattcgcgactaacgattggctgaaccccgactgcaacaccgttgaatagggatagaccaactagtaagatgttggcgataatgccgtaagcggcgatggcatagttattactgagatggagaataacaatgttaaagacgaaaatgctgaccccagtactcatttcagttaagaaagatgggaaaccgagttgaattgctttgaacgtcggtttaaaacgtaaggttaagtgctgcaaagttagtaaccgttgtgggtgatgccggtgttgtgtcaaaatcagtaggctgacgattggcgaacaaatcgtggccatcgcagcacccatcatgcccatgtgtagggggaacattaagaggtaatcgaagataatgacgaataagctttgtgaaagtgtcgcaatcattgtcaaatgtggattactatcgttacgtacgaaacttaagactaagttattgatgataaataagggactgccaattaaaataattcgtaaataggtcaagcttggggcgagcgtttcatgattggcacccagtaagtggagtagtgggtgaataaaaattaagccgagcgccatgatgatgaggcctaataaaatcccaaaagaaagaacttgagtgaaaatcgagcgactcttttcgggatgcttgctcttgttaattgagaaaatcgtggcgcccccaatcccgagcatcagacctaaaccgttaaataagttaaaaatgggcagatcaatattcaaagcggccaagccaattggtccgactgcgtaagcgataaaatatgtgtccgctaaaatatagatggataagcctaacgagctgaaaacgtcacggatgatgtagcccgttaattcttttttgatatgtggtgagttttccaaaataacactcctattcgattggtagtggggtcgccattaataacgcaataaatgattggattggtgctggtaaattcttccgggcgacaaggtagaattggcgttgatattgttgggacaatggtcgatagggaatttctgggtaatcaagtaaggttgcgctagaaactaatgattggccgataccctgtcttaatagttggataatcatcgcattgcttttgatggtcatcacgttttcgagtggtaaattattttctttgacgtaattcatcgtgtagtgatagacgccagaaccctgttcacgaagcaaccagggttcattcgggcgacctgctaggaccagttgatcggtctgtagtggcgtccgaattaagtctttttcggttaatggtttttcaatgaaaccaaagtctagtttgtgctgcgtcaattcttgaacaatctgcgatgagttgagtgtactgatatctaaggcgagtgtttcaagggctggccgatgcgctttaagcagggttggcaataagtaggttgcagtggtgtgcgaggcgccaattcggcacggtgtttttggctggccatcttgatgatggagtgcgtgcaaatcttggtcccataaatcaagaagttgttgtgcttgttggtagaagagatcagcactcttagtcggcgtcatctgctggcgcccattgcgttcaaatagtgtgacccccagcgcatcttccaattgtttaatttgcacagaaacggtcggctgcgatagaaaaagcagttgcgcagccgttgtaaaattcttggtttcataaacggttttaaaagttgttaaaattttaaacatatcatcacttctattcgttatcttaataacaactattataaagatttattttattaattgaaagagtttcggtatagtttaagataacaagtgagaaggagtaaagcaatggacaatataacaaaaaaaatacctggctttgcgttatcgttagcgattgcgattgccagttattacatcgctaaattatggttaccaatgttaggcggcgcaacgattgcgctttttgtcggcatcgtacttggcaatacttggttgcaacaaccggtattagcagccggaactaagttttccgagaaaaacttattggaatattcagtcatgttactgggtgcgacaattacattccaaagtattcaacaaatcggctggcatggtgtgctgtttaccgtgttacaaatgagttgtacgattggatttgccatctggtttggccgccggttgcaatttagcgaaggtacctatttaatgatggccggtgggaatgccgtttgtggctcgagtgcgattggggcaattgcgcccgtcatcgatgccgataacgaagataccggcattgcgattacattggtaaatctaatggggaccatcttgatgttactcttgccagttattggaacgttgatgtggggacataataatgaactccgtggcgtgttaattggtggaacagtgcagtcagttggtcaagtggttgccagtgcgacgatgattaaccaaggaacggttgtcacagcgaccttattcaaaattttacggatcatctgtttggtttttgttgtcagcggttttggttacttacatcaaaagaaacaaagtaaagtcagtgatacaaaactgagcgaacaattattagcgaagaagagtagcttagtgccatggtacgtgattggcttcctattattctgcgtcttaaatagcttacgggtttttccaagccaatttggtacactgtgccatttcttgagtacatggtgtgaaacaacggcgttagcagccattgggttacgcttgaacttaaaggcactcttcagccaaggtaaacgtttattagcatatgccggcggattagtgaccgtacaggtagtcctcgcgattttattaattacactattattctagggcgtgtcagcagctaggatgtttctaggaatattgaattattaaaaaatctgccatcaacaattttgttgatggcagatttttttgttattaagcttggtaagtgccgacttgaacggcttgttttaaagtggctggtgtgtgatgtgacttggcgaaaaattcgcttaaatcacgtccggctgttaaacctttaaaatgtttgccgccttgccaaggggcgattgcggaaaggtcataaacgacgccatcaacggcaacgtatgcgggttgaccatcttgaccgttatattgagcgagtgtttcttttgtaaagactttatctgtcatgattaaaaatctccttcgaattgtgaatgggttaccaataatatagcgctagatgcagaagttggcaacgattaagttgtgcactttgaaaatgaataatgttgaggctagcgaattagagaattattcgtgaccttaaatactgttcttcaaataataatttgttaaaataatcataattgggggggatgaaaatggacaataaaaaagactggttgatgcgacaagttgattcttttgcggaaggaatgggttatttgttatcgaaacaaagtggtaattcacagtcggaggttgtctttccacaagaaaatgctaaaaaattgccttttcaaagggaattggcaagtttaattgctgccaacgatactagaggggccgcccaacgattattaaaattacaatacgcaatgcctgaagaacaatttctacagttaggtacatggttattattagaaatgaagcaggacagttttcctaatcctttaacccgtgaagcgctgacagacgttttaaatacgattaattaaataattgaacgaaaaaaccaccctaataaataatagggtggttttatttaatattgatggacccgaccagattcgaactggcgacctcctacatgcgaagcaggcgctctcccaactgagctacgggcccaaacgcttacaaaaatattttagcacttttagctaaaatagcaaggcgaattagtgacgggcagatgttctgaggttatttgcttttttgccacctttaatcgtgcgggttttgaagtgggcttgttggctatcaggaacgaacttgaagtgttgcattttcccggcatatggttggccactgaggcgaatcttcaaccaatcttgcatggcttcaatcattccagtcagtttttcggcttgttcagaatttgcttgtttttggacttcggttgtaacatcgttagtgagataagccaataatttttgatgataggcaattagttcttctgtgagtggcgcttggttatattgattgaaaagtttttgaacaaaacgcattgcatctttagcgttttgtggttggtaaaagcgatcttgatcagacatagaatttccctctttcttcagagtagtataacgaataatagtgctcgtcacaaccgtgtgctttggtataatagagaaatactagtttttcggaggtcagcaatgtttaaacgtaaaagtgattggttcttagtggctgcactggtgatgatggcgatcttattttacagttcttcaatgacgtatcatgaacaaacatcggtgcccactttggaacgatttctcaagaatgaaccacttaaggcttggttaagtcaattttcgttccattatgcaggcagtgaacagagtgtaaaagcatctgggtatttcaaatttgtggagtttttcgtgcgaaaaggcgcccattttgggacgtatttcttattggcggcttttagttatttagggctacggccacgcgtaaccggtggctttttagcagttatctttagttggctggcagcaaccgggtatgcggccacggacgaatttcaccaaatgttgactggtgatcggacgccactttttcaagatgtgatgttggacagtgttggcgcattaacggggattgtgattgtttgcgcactacagtggatttttacacaaaaaaagagacgatagcccgactatcattgcttttagcatggtaatttgctatcatagaaaacgacttagtaccagaattctataatcgaaaagaggagttagatatgtcaggacattcaaaatggcataatattcagggtcgtaaaaacgcacaagatgcaaaacgcggcaagattttccaaaaactatcccgtgagcttttcatggctgcgagaagtggcggtcctgacccaagttctaacgccgcattacgtttaattatggataaagcacgttcagctaacatgcctaaagataatatcaaacgggcaattgataaagctgacggtagcgatggcgcgaactacgatgaaattacttatgaaggctatgcaccaggtggtgttgccgttttagtacacgctttaactgacaataagaaccggacaagttcagacgttcgtgttgcatttactcgtaatggcgggacaatgggtgcttctggctcagttgcttacatgtttgatcgtcgtggttacattgcgattgcacgtgaaggattagatgttgatgaagatcaaatgtttgaagacattctagaagctggcgcggatgatttacaaactgaagaagacgtgtttgaaatttacacagatcctaaggaattagcaaatgtccgtgatattcttgaaaagaaatacacattggcaaatgctgaattaacaatgattccacaaaatacaacaccggttgatcctgaaaaagcagaacaattccaacgtttaattgatgctttggaagacaacgatgatgttcaagaagtttatacagctggcgaactaccagaagaagactaatttgtttgataagtgcgttgcaagtaattgcaacgcactttttttgtgcagaaaattatccggttatttgcgtatctttggttagtcaggaaggagggacgagatgaccgaagtattaacaacccttttgcaaaagtgcgcaacggaaaaagcgcaggatctttattttcgaccactatcgacgggttgggcaattattgaacgcttagcgacaggactaaagccgttacaaaaagttactctgtcagaaggcaatcaatggctcaatcaaatgaagtatcaaggggggatggatatcagtgaaactcggcgtccacagaccggccgttcagcgatcgaggtggcaggcgaattgatttatttacggttggcaaccgtgggggattttttgaatcgggaaagtttagttgttcgtttcatttatcccattgggcagacttatcattgcgacgactcgcagattttaagtcgtttaatgcagttaattcagcaaccaggattattgctatttgccggtccaactggttcagggaagacaacaagtttgtactatcttgcggaacaagtcatgcaagataagatggtggttgcgattgaagatccgatagagattcaacagccagctttcttacagttacaggtgaatgaagccgcagggttaacctatgcagcattgttgaaaatcagtttgcgattacggcctgataccttaattattggtgagattcgcgacttacagacggcccaacacgcggtttctgcggcgttgagcggtcacttggtactaagtacgattcacgcgcgaagtacaacgggggtgatggaccgtctattagatcttggaattagccactcacaattaaccgcttgtttagcgggtgttgcctatcaatcactagtggtcgaaggccacaatgtagcggcccactatgagttagcaactgcacaacagttggaggaggctgttcatgaagactaaaaccactgttcaattcaatactgaatttatgttgctgttagggcgcttactgcaaaatggtttttctttacaacaagcacttgagttcatgccgattgtttttccgacacaaaagcagtggctgcatcaggtgcaaactgggttagaagcaggaaaacgactagcaccaagcttagcggcggtttcgtttccaacacaccttgttgcacagattgaattgactgagttgcagggaaacttaggcgagtgtttgttacatcttggccaattacagcgaattcaacagaaacggcgtagagagttagttggcgtaattgcctatccctgttttctactcctttttctcggggcgttgattgggatgatgcagatttatctttttccggaaatcgcgcagtttaacccaacaacttcggcgacatcaccattacaactattttttagagtgatggggacattcgttattatggctggtggtctgattagtgtgtatttattccgttggcatcggcgaccgctattacaacgattggcggcggcatttagatggcccttcatcggtaaaacgttgcaggcttactatcagtattgcttattatttgatttagcgacttgcctgaataacggcttaaacttggccgaaatgcatcagcttacacatcgtttggcgaaaacatcgtggcttgtacaattaatgcaacaacttgaaacggctgtccaaaaggggggcacgctattagcgaacttagcggatggcgttttttatccacctgagctgcaattagtgctcgctaagggaagtccgttacaacagatggccaaggaggttgatctgcttgcagtcattaaatacgatgaactgcaacggcaattgaaacagaaggtgaattggctacaaccgctcttgtttatcctaattgggatcatcattatttgtacctatctcagtattttattaccgctatatcatacaatggagggaatttcatgaagaagaaaagaaatgcatttacattgatcgaaatggtcgttgtgctagctgtgatagcaatgttagtcttgttaattgcacctaatttaatgcatcagaaagagacagctgagcaaaaaacggatacggctctagtggcaacgattcaaacacaagttgaattagctgaggatgacggtaaaacggtgtcgagtctagccgatttagcatcaggtgaaaaatatttaaccaataatcaggttaaacaagctgaaaaacgcggcataacaattaaggataataaagttgttcaaaatacaaaataaggcgttcactttaatcgagagctgtcttgttttgttcattgttggagtagtcagtttatttgcgttgcaacatattcgagattatcgtgcacggcaggcggagcgtttattttttgaacaatttgaagcgtcttggcatgcgactcgcgaatatgtcgctgttgagccgcataatgtgcacttatcttgggatcaaaccaaccacacgttgcattacacaagtgcggatccacaataccaaagtatggatatcccgattccagaaacattgatgtgcgtcgatccagaaacatggtttaggattcaatttaatcatgactcagctgctagaccgcggtcattgatttgtcggtctaaaattgatgggcaccgttatgaatatcgggtccagatgatgtgggggatgttacatgttaagaagtagaccggcatttctattaatagaacaaatcgtggcgttaagtcttctcctgatgggaggcttgaccttgacaatgagtctacggcagtttaaagcacatcaagttcaacggcggtgtgctactacagaatatgctgtaatggcaatggctgccaatcgattggcaaatgagcagccgccacaagcacaatggcagttgcaacgggaaacataccaagtcgtcaccaaaaaacaggccatttatgtcacaaataaagcgggtgagcgagttgcacttcaatggtattgttactaaacgctctggatttacactgattgaaatggttgtagctctcgttattctgatattgagcagtcaattaatattggcaaccactaaaacactaacgcacacaacgcaattaacccagatggaacgtcagaatattaattggcacattagtatgattgaacttgatcgttttctggatgacgctcaatttatttcaattgaacaggcgaattatgaacagcaattaaccgtcgctaaagattcgaaacgacgctataccttaacgaaaactaagaaggaactggtggtttcgagtacgaagaatggttatatgcctctgtttgatggggtctcgcggttaaaaatggtgtatcacgaaccttttttagaactcgaagcgcgcttaagcgatgggacagcctatcaacatgaatgttttttggaggcgcaacatgacacgaaaaatacagattaaacgctctgcagtcgcgctcttgaatgcagttttgatgttgagcttggtgacaagtgcgttgttgattgtgacccacagttaccaacagcaacaacagagttacgtcagtttgactaactattaccaaacgcaaatcttgcttaaattaacaaataaagcgcggcaaactcagtcaattcaaggtataaagactaacatcggtaagagccgtatcgaccagcaacacaagttaatcatcattgagttaaacaatggttatcgaaaacagtttccagatcagaatgaaacagatcaaggataaattttctatttgataaagcgcttactatgatttataattctaggtatacccacctgtattacttgctttgccgttagaataccgatagaatataacaggaatctaatgaatagaggtggctattttgcctaagagtgctgtagaaacgttgtttgatcaactcgatcaaacaacacaattaattgaaaagaatttagaaacaacctatttggatgcactcaccgagaccattgctaatattgcagatggtggccgcgtaaaggttgaagacggcttaccagatgctgccactgttgcacaactagaaccgctttatgcggcggttaatctcaaccaatttgaagcagaagaaattcgccaagcattacagttggcaacgctcaagggtttgcgtcaagttaaagtggaaccaaacaagcaaatgacaccagatgcgatcggctatcttgtagcttatttggcagaggtttttggtggtgctgaccaaatcaagacaattttggacccagttgttggaacggggaacttattggcaaccgtaatcaatcatatccaaaaactaacggggaataccgtgcaaggttttgggattgataatgatgatagtttgttggaaattgcgggcatcagtagtgaattgcagaagcattcaacaacctttttccatcaggatgcgattgaaccgctactggttaaaccagttgatatcgccgttgcggatctaccaattggtttttatccattagatgaacgggcggctgattttgaaacccacgctgccagtggtcattcatatgcacatcacttgttgattgaacaaacgatgcattatgtgaaagaaggcggctatggctttttcctagtaccaaatgtgattttggaaacggatgaagctaagcaactgattaaatgggtgacaaaacatgtctatttgcaaggcttattgagtttaccagcaaacttgtttaagactaaggaaggtcaaaaagcaattttagtccttcaaaaacaaggtgccggggctaaacaagtggaccaaattttattaggtgaatttccaaattctaacgatcaaaaggcgtttgcaacgtatctacagaagatccggacttggcataaagataatttacaataatcgaatagaaaaggtgattagatgtcaaaagtattagcaattaacgctggtagttctacccttaaatggaagttatttatcatgcctgaagaacaagttgtcgcacaagggatggttgatcgtttaggattatccgattcagtctttactgttaaatacggggatggtcaaaaattctcaatgacccaggatattaagacgcaagatgttgcggttgatttgttattgaagaagttaatcgaatttaaaatcatcaatgaatatagtgaaattagtgggattggtcatcgggtcgttgccggtggggaagactttaagtcatccgcattaattgatgaagcgtcattaaaacggattgaagaattgtcagaatacgcaccattacacaatcctgctgaagcaggtgttatccgtgctttccgcaagattttacatgatgtaccacaggttgctgtttttgatacatctttccatacaacgatgcctgaagaaaattatctttacagtttgccgttggaatattatcacaagtatggagcacgaaaatacggtgcccacgggactagtcatcggtatgtttcccaccgtgctgctgaaatgttaggcaaaccattggaagaattaaagatgattaccatgcatcttggtagtggtgtttcagtgactgctattaaagacggtaaatcgttggatacatccatgggctttacaccacttgcaggggtgacaatgagtacgcgttcaggggacattgacgcatcactcgttgcatttttaatggaaaaattaaacattaaagatccagcagaaatgatcgatattttgaatactaaatcaggtatttatgggatttctggattatctcctgatatgcgcgatcttgaaaaaacgcgtgaagaacgtccagaatcacaattggcaattgatatcttcgtcaatcgtttaatcaagtatgttggttcatacgttgccattatgggtggtcttgatgtcctagtgattacagccggaatgggtgaaggtgacatcttaatgcgccaacgcatcgccgatcgcttgagtttctttggcgttaaagttgatccagaacgcaataacgtgatggctcaagaacgcgtcatcagcgctgacgattctcgcgttaaagtattattagtaccaactaatgaagaagtaatgattgccagagacgttgttgaaattggccacgtctaaggcatcagtgaaaatgaccagcgcatggctggtcattttttagtggagggaatgggaatatgacaggttttacattattttatggcttattggcaattgccttactcattatctggctgattgttgaaacgaaaatggtttggcgcgcaaaacggaatcgactatggacgatttttttatgttgtgctggaatcctcttactaggtttaacgttagtgatgggcagaacgctcagcgatcaaatcacaggtatcggctctgttgtaattttaattgtgattgctttttggcctcgtggtttaaccaaaacaagtttgattgcaaacttaaatactattcatcaatttgcagcgatttctaagattgaattactaacacaaggtgacttagtcgaagcttgtttttatgtcggtgaaattcggattgccaagttgcgctttaaaacgacggtagaaaaattacaaacctttttaaaagaccggtttcctaagaaacgcttagtggtgaaatagggttaaagtctttcatattactggctgatatgctaaactagtatttgcatatcggggccgttacggattcgacatgtgtaggtgagcgtgagttgcacttcgtaggttacgtctacgttaacaacgttacagttaattataactgcaaacaataacaattcttacgctgtagctgcctaaacaccagcatagcgtgatccgcctgacttcacccaagggttagatccgggtctcaaattaattgggttacgttaaacgctgccgtttgaggtgtttaaaagagatttgcaaactagctagttcatccgagcttctgtcggacggcgttttggactagcgaactcctaaatcgttcgactatgagtgtagagattgacgtggcaatgcgcatggacgcgggttcaacccccgccggctccattagataacaaggtgttaagcagaattaggcgcttaacaaaaggcgattaacactaccgtaacggtgttaatcgccttttttgtttgcaaaaaaataacagccacacgtgtgactgttacattaattgcttatgcccaacggtttgtttttgttggtaagagcattaggatatagaaccaaattgtcccgataagcggtatgaattcaatgagtacccaccagcctgagcggtctgtatcgtgaagtcggcgcattttaacggataaagttgcaatccaaacaatgaagacgacgatgttacgacccattgagatgcctaaatccccaatattatagatttctgaaattggatggccggttattgtttgaataataccgatgataataccacctagaatgtagttaatgatgattggccaccagaaatcaggtcggtttgaagtgcctgagaaatcaaaaatccgggaccaaaaactttgatatgatttaaccatgatgtaaaacccccttctccttatcagcttttcgcatcgtcagttctggacgagatgagaagttatgataaatttaataacttcctaccaaagatattatgacatacttaaacgagttttttacagtttttagcttacatagagaatcaataatttattcgccaacgcccattaatgaagcaagaatgaataataaccaaatgtgaattgggtagaacaagtagaagaaatacttcatgctacgtcctttttgtccgttgtacaagaggattgggataatcgcgaagatcatcatccattgcgtattgctagtgaagagtccagtgaaggcaaatccggagttgattccagcgtcaaggaatgcgaaaacaagaacggtaagacattgtaagagccggttgtttcggaaaagataaaaaaatactcctatgtagaggagaaggccattttccgcaagcataatggttggaataaccattgcgagattggcagcaaacatcattgtcttagggttagcaattagaccaagcgccaataatgataagaggataggagcaataattgccagtccaccaagcaaaatttgtttggaatggtgcgtgcggcgaccgacactaatttcttgaatcccatacattgctaaaacggcaatgtataaatcggtaaaaatattgtttgacagtgcgaggttaccgacttcgaagaagtgttggacaatggggcttcccaagttcataatccaaaaaccaacgagtaattggaacatgtaacgtttttgattccgcgtatgtatgaatccttcaactgccataaagaataagatggtggcaactggtcgtccgaaccaatcaacccagccagggaccccagccccggcgaacatttggtgcacgtgatcaataaacatgaggataattccaattaccttgacgtcgaagttatttaaaacttgatatgatttagtctgcataatagcctccctaaaagttaagtaagtacattatcgtatgtttagctcatattattaagttttaaatggctagtgacaataatgttagatagcaaaaaccacgataaaaggaatttatcgtggttctgagcttatttagcaatttggcttgtgccatctgcataatttaatgtaacgccgtcttggacgttaaaaatgtaagtgttaaattgaatgctgttatccccgacggattggccttccatttgaacgccgcgggctagcagctcattatcgttaaaaataggtgtgacacggtaacgaacaaaacgattagggtgttttttgagataataagcaatatctgattcatgggccagcatttcgggtgcgtttagctggcgtgttcctgtcatcagattctttggattattattttcaccggttagttgatagccaatacttaaagtttcgtccaatatttggggttcacttcaaacgctgtttttttaatagccggctgacaagtctaccggattgacgggtaattcacctttgtctaaataactgggtaaattttgatcgaaaattttgaagagccgttcatggatatcagcgatgtaacctgaaatatgtggcgtgataatcaggtttggtgtggcccataatggtgaatcacttggtaatggttcgttttgggcaacatcgattgctgctcctgccaaatgaccggattgtagatagtgcatcaaagctgcttcgtcgactgaagcgccgcgccctaaattgaagaagtaagcccctcgatggagttgcgtaaaaaaggtggtgtcgaagaaccgattggttaccggtgttaatggcatcacattaatcacgaagtctgcttgtggcaatgcttgttcgtaatccgtgtcggttagaatctgatcaaaattggcaacgggtttctcgtgccgattaacgccgattgtgtgcatacccatgacgtgggcatactttgcaatttcctcaccaatttgacctgttccaaaaatgaggagtgtgcggtgttccaaatttgtcatttgttcaccaatagcatgatgctcccattgatgcgctgcttgtgcgggtaagctctgataaatcccacgggtaaagtgtaatatgtaacttaatgccgtctgtgcgattggttttgcgtgcatcccgcgtgcgtttgataccagtaccccttgcttagctaacgtggctagtggtaaataatcaacccctgagcttgcggtctgaatccattttaattgattaccgggctctgctaaaattttcgggcctacatctttattccaaccaaacataatctcaatactacccagttgacttggttttaaatcagctaaagcgatgattgttaaaccttttgcagttagtgctttgacgtgttgttcaggaattgtttctgctgctaaaatgactgtcaagttgatccctcaccttattattgaagtaatctttattataagggattttcagcaaataaaaaagcattaccgactgaaaacggcaatgctttataaaaaattttattctttttctgcacgtggccatactggacgaccccagtattggaataaatcagtttgaatccgaccattatacaatttccggcgtttagttgcgcgttgcccgaatgattcttggaattgtaagtcacttgttaaaatatacttactccaagtcttcaatgaccgataggtatcacccatttctttatacaaagcacgggcttgtgtttggtcgcttaatcgtttcccgtaaggagggttggcgatgatgaccccgttggttaaatctgtcttgaaatctttaacagcgagttgtttgaactggatatcatgtaaaacaccagcttcgttcgcattcaacttagcgatatcaatcatgttttgatcgatatcataaccaaaaatttcaagtggttggtctttttcggctgctttcgcttcggctttggcattttctaaaacagaagcatcgatccaatcgaagtcttcaaaggcaaacttacgatgcataccaggtgcaatgttgtgaccaattaaagctgcttcgatcgcaatggtcccagaaccagtcgttggatcaacaaatggcatatcaggttgccaacggcttaaaagaattaaggatgccgcgaagttttccttcaatggggcttcccctttttcaaggcggtagccccgcttgaataaactaggaccagttgtatctaagctgatcgtcacgacatcttttaggatgctgacttcaagcggatacgttgcgcctgtttcagctaaacgtgttcggcggtgatagacagtacttaacttatcaacaatcgcttttttagtgatggcttgcacgtctggttcgctatggagcgttgaacggactgagcgaccagcaactggaaaagcggcgtctaatggcaggaacttgtcccatggcaaagctttcacttgttcaaaaaggtcatcgaaggttttggcctcaaattgaccaatcgcgattttcacccgatcagcactgcgtaaccagagattggtttttgcaatatctgccacatcgccttcgaaatacacccggccattatctgaacgtgtttcataaccgagattttgtaattctttggccgtaatggattcaatcccactcgccattgttgcgtatagttggtaagtcatgtttttaaagatccccttaggaaattattttttaaataaaaagagcttgggcaaaagcccaagccacctgattgtaaacctttataggccatgttttgttccagaacttccccaggaagaaagttccttcagtaatcatctatctgttcttacgaactctcatttttagttcatttccataaatgagacgcccctaccaaagtttgggttactcgctcgcggggtttacctcgttccaccgtccaagtttccaaggacgctccgtcactgtggcactatttaaggatattcacgcatgaccgaagttttagcgctttttccgccgttaccgttaaggtaccctggcttattgggccaggcacgaacactacaagcatctcagcctgtgcgggcatggaccttcctcagcctaccgatgtagaccgcgattactcaagatttacaaatattgaatcaatgtttataagtatagcacaagattaaagatttgtctcgtcaaattgtgaatgattttgaactcttgtctgtggagcttgattttgttcacttaacttagcaccgaacacgtggcgttcaaggtttgataagcgtttcaaaatatcatagttggttgctgctgaagcttgttgtggtgcactttccttcacgttatcagaagcgctgagttggcggtttaattcgtcaaccttcttgaataagcgggcattttccgccgttagccgatcgattgcttcttgataagtttgatagtctttaataactaaatcaaggtaaccatcgacttcttcaggttcatagccccgcatttttgttttaaattcttttttcaatatatcagttgggttcaattcgatttcaatttgattgtccattttgacacctcatttagaataaatgtactatgattcccattatagcaaagttatcggataattaaaactcttgctgatctaattccgctaactcagtcgcgatatcttgtagttcgaaaaaatcgaccaagttaatcggataatcttgttggtcttgatattggcgggctgcatgataatcatattctggtttgcccggtgattcacgatcatagtataatagttgaccatccgtatgggtcagcatgaattgttgatactggcgcaattgttgcggtccagaatacggtgcgttaaccactggttcgcaaaaatcgactcgcgctttgagctgactcaattgagcttggttattttcgttccattgttgaccaaaatcattaaacggcaacatcatcgctaattttaaatccggatagtccgtttttagttcaatagcaacttgcagactccactgttcaatccccatttggccaccagtgatcacccactcgagcccatcatctaaatattgtgttaactgcttttttaatgaatatttaattactttaagtttctcgtcagtttcgccaaaaacaccgagttcatagcttcgatagccgctcacccatagtcgtttcaagtcaggtccctcccaaatgattttcaattaaactaaacattgctataatagtgaaacaggagtgtgattttcaatggcctttcattatcctaacggacagccttatacaaataatgagacaaaaccaactaaaaagcaagcccggcaaccagaagcaacaacgttatttggtaaacgcggcatgacgttggaagaagaactcaatgatagtaatcagtattatcgattacatgcaacggctgtcgtgtataagaaaccaacgccaattcagattgtgaaggtcgactaccctgcccgcagccaagcggttattaaagaagcttattttaaacaagcctcaacaactgactataatgggatttatcagggccgttacgtcgattttgaagcgaaggaaacgaagaataaaaccgcgtttccgtttcggaacttccatcaacatcagattgaacatttcagagcctgcttgaatcaaggtggcatctgctttgtcattatgaaatttgtcccgctacaacggctattcttgtatcccgcaacagaactgattagccgctgggacgcgcaagttgatggtgcacgaaaatcgatttcactcagtgatgtgattgacaatgggattgagattaagtaccaacttaatccaattattccctacttagatgccgtagatcagttattaaagcggtcaaataaaggagtttaaagaacaatgtccgataatcgaaacaataataattcgcgagttgcaaggcacaaagctgaagcaaaacccgctaataagaaacgccggcccctctttttaagaattctaaaatggctgttactactgattgtagtggctttcgtggctgggattggtttgtttgcctactatgttaaagatacaccaaacctaacgcaagcggacctgcaaagtccgaatgcgacaattctatacgatgatcaagggaaacctttcaaaacaattggtggtgaaaatcggagttatgtcaagagtgatcaaatcccgcaaacattaaaagatgcagtagtctctattgaagatcgtcgtttctataaagaaaaattcgggattgatccaatccgaattgcgtctgctgcagtcgccaatattattggtaaatcaccactgggcttacaaggtgggagtactttaacccaacaattgattaaactgtctaaattctcaacgaaaaacagcgatcagactttcagacgaaaagcacaagaagcgtggcttgccgttcaagtcgaacgtcaatattcaaaagaccaaatcttagagtattatatgaacaaagtgtacctgaataacggggtcaatggtatggggacggctgctaagtattattatggcaagtcgttgaaggaattaagtttgccacaactggcattgattgcgggtatgccgcaatcgccaagtaattacgatccgtacctccaccctgatttagcgaagaagcgccgtgatttagttcttgatgcgcttttgcggaacaataagattacagcaactgaagctgccgaagctaaacaagtcccaattaataccggcttagtggatcaacaaacagtagcgaatagttcaacggattctaaagcaaccgacgcttacgtcaaggaagtcctcgccgacttgaagaaaaaaggctatgatccgtacacggctggtttgaaagtctacaccaatatcaatatggacgcgcaacgtaagttatacgatatcgtcaataatgatagcagtattccattcccagatgatcaactacaaacagcagtttcaattacagatcctaataacggtcgaattgttgcgatgattggtggtcgtaaaactggtgatgtgcagctcggttataaccgggccgtgcaatctggccgaagtaatgggtcatcaatgaaaccattaatggattacggtccagctatcgaatatcttgactactcaaccgcacagaaactacaagatgtcccttacacttatcctggaaccaatattcaattgcataactttgatggccgttatctcggtacaattaccgcgcgtaatgcgcttgccaactcacgaaacgtcccagccatcgaactgttagaagccgttggcatgactaaagcccgtgaattcgtgaaaggcttaggcattaacgtgccagctgatactggtctttcttatgggattggtgggaatgtttcaactgttgatgaagctgccgcatatggcgccttcgcaaacggtggaacttactatgcaccaacttatatccataaagtcgaaacagccgatgggattacgcataattatgattctgatggcacacaggctatgaagagttcaacggcctacatgattactgatatgttaaaagatgttattaaaaatggttctgggacgttagcccaaattccagggcttcatcaagctggtaagactgggacaaccgattattctagcgaagaaattgccaaatctgggttaaacccaactttagcgaaggatagctggtttgccggttataccaagaactattcagtgacggtttggactggatacgatgaaccacttaaaaatggattaacaatgggtgagcggaacgtcgccgcttatatctataaagcaatgatggcctacctcgctcaaaacgcaaccaactcagattggtcaatgccaagtaacgtggttgctaaaaacgtggctggcgtacgagaactctatattaaagggacgacgaccattccaagttcttcaagcagtcgatcttcttcaagtagtgtactctactctagctcagaagcaccggtcagctcaagcagtgaaatttctagctcaagtagcgtggttgaaacaccaagtgaatcttccagtgtgccggagacctcatcttcaagcaccccaactgaaagttcacaatcgcaaccttcgacctcaacccctccggcaacaactaatccaggaacggggtcgacgacacaaacaccagcagcgccaactaactaaaagaagcaccgttcagttcaacgataaacgttggctgaacggtgctttttttgcgttttttaaccacgatcttcaagaaattgttggcctgcttggcaaatccttaataagggacactcatcgcaatgcggcttacgtgccgtacagacttgccgcccaaaaagaatgagtgtgtggtgcgcttgaacccatgttttcttaggaagcttcgcttgaaagtccttttcaatctggatcaccgaggcatcctgtgcactgattttgagccgtttggcaatccgagtgacatgcgtatcgacggcaaatgatgggacgttaaaggcgtcacctaaaacgacattcgcggtcttacggccaacaccagcaagttgttccaattcggcatgtgtgcgcggcacttccccaccaaaatctgccattagttgctggcagcatgttttaatgtgtttagctttattatgatataacccgattgaatgaatatcagcttcaatatcggcaatctctgcattcgcgaaactagctggtgtcgggaaatcagcaaatagttgtggggtgaccttattgacggaaacgtcggtggcttgtgcgctaagcatcaccgcaatcaacaattgaaacggtgaatcagcaactaatgcgccctgcgcatctggaattaaattgtatagttggtgcatggcccactgtgttttggcttttgataacatccgcttcatctcctattcgattaacgtcttggatgggccttttggtaagcttgtagggattctttatcagtaatattttgtttctgccagttgagcaaaatcttatcaacgtacttcaaggaatagacttgatttaaaacggattctcgcacggctaattgaatcaattctggttgataatgatctaaatctaaccagttggcaacaatctcagattccaatggcgataatgggcggccaagagcttgttcaacttggttaaagaccgcactccgttggttaccgtctagtgcttgttgagtgacttgtgcgtcttgaacggctagcacgctcaatttagttaaggctggtgtgagatcgtaatggtcttcagcctggccttgttcattgacagatgatttaagggtaattagttttttctgtaaaagttgatgaatcaatgcgtaaatttggctggattcaattcccatgcgttcaccaatcacagctaaatcgggaaagtcattgttttgactggcaaaatcactgagctgtaagtaaatcactaattcttcagaagacatcttgagcgtttgatagtgatgcagtaacagtcgagagacactcaattggccgccttgtaaaaacgcggtaagttcgttcatattctagccttcttttctaaaagtttcattagttctattgtaaccaattttagacaaataaaaaagcgccgagaacctgatttcggttcacggcgctttagttaatcctcaaagccaactcgtttgagtcagcactctgatttgaaacatgcttttgaaagtagtcctcggtgctttgctacgtccagcaaacgatcgacttgcgtcgctcattcactagactagacaaatgctcgagaactaaccactttcaacgcactctaattcaaacgtgcttttgtagctaggttcctgcgcttaacaatgattgtcaaataatcgattgcatcgattattcgccaaccaacgttaatgctcagaacctaaccagctacaacgcactctatttgaaacgtgcttcttcgaactgccttttccggttaactgtaaaacgggcaccatggctgtgaagcgccataatgcccgttttgctgttaatcctcaaagtcaactcgttcgagtcagcactctttatggtttgattctgttaatcattcttgggaatggaattgtttcacgtaaatgatcgataccacagatccatgtaatggcccgttctagacctaatccgaaaccagaatgtggcactgatccgtaacgacgtaagtctaagtaccattgatattcttcaaggtctaagcccattgctttaatttcagcttctaatttatcaaagtcagtttcacgttcactaccaccgataatttcaccataaccttctggtgccaataaatcagcacataagtaaacatcatcacgtgttggatgtggcttcatatagaaaggtttgatggcttttggataattcaaaatgaagactggttgttcaaattgatccgataaataagtttcatctggtgcgccaaaatcatcgccccatttaatatcgaagtcagctgcttgtaacatttcaacagccttatcgtatgaaatacgtggatacggtgttttagtatatttcttcaattggtcaacatcacggtccaataattttaattcataggcacagtgatcaatgacgttttgaacaaggtaagccacgtatttttcttggacttcaagactttcatcttgagttgtgaaggccatttctggttcaatcatccagaactcagtcaaatgacgacgagttttggatttttcagcacggaaaacagggccaaaagtgaaaactttgccaaaggccattgcgccagcttcagcgtataactgaccactttgtgttaaataagcatcgttgtcgaaatattcgatgtggaataattcagttgtcccttcaggggcactacccgtcaagattggtggatccatcttgatgaagccttcttggttaaagaattcataagaagcgcggatgatttcatttctgattttcatgatcgcaaatgggcgttttgaacgtaaccataagtgacggtgatctaataagaattcaatcccatgttctttaggtgtaattgggtattcgctgctgtcaccaattaattcgatgtcagaaatttcaatttcataaccaaagtgtgaacgagtatcttcatgaatgacccctgtcacccacatacttgattcttgtttgacatcttttgccaattggaaaacggcttcgcttacttggcttttaacgacaaccccttggaaaaaggcagtgccatcacgtaattggaggaatgaaatcttcccacttgaacgtttgtcggttaaccaaacgccaattttaacttcttcatcgacatggttttttgcatcgataatactgatttttttaaccataaactctgtctccttatgtgcaacatttaatttacaacagttcaaaataactgatagttattattatataacaaaaccctgacaaccacagccccctaattgagaaccctagatattttcaatcaattgaatcgtcttcccggttttaaaatcgagggttaaataacaaagacggcctttgtcacttttatagacaacttcccaaacaggcttgttgcggtacataccgaagttaatgttcagtactttttgcggatttttagttgaccatgtcttttctaacgcatcgtttttagaaataccaccactttgacgatagacagtggcatgattgccttttccgttgattaaaacgaagatgccgtgattatcacggtctttaccactaacggtataatatgttgcatttcgatgatacgtgtagaacccatcaggctcttttaatttcgcgtattttttagcaatgttaacggctttggtttcagccgttgcttcgggttttcgagcttgatgataaatcatcagcatgctgccaatgattaccaacaataagaatatccagagccatctcttatatttgcgcacgctgcattctctccttgttcgcttgaataagccttattatagcaaaaaataacggctatcggcgcttaaaaccgaatcttagtgggaatttaaccaaaacaagtcggttaattcccggattattttaaccgacgctgctttttggggcaaacttgtcggtaacgcgcggcgcatttgttgcccatattgggtcgataataaccggggatctaaacaaatgaagacgccgcgatcgttaggggttctgattaagcgcccaaatgcttggcgtagtttaatcgttgctttgggtaaagcctctgctttaaatggattaattccttgggcagaaagttgagcgtaacgaattcgtgtctgcagtgcattcggcgcatcaaatggtaattgaacaagcaccactaattccagtgctgattccggaaaatcaacaccagcaatgaaactgcttgtcgccaacaagattgaatcgtgccccagcataaagcgcttggtaattttctccgcactacccgtaatcccttgggcaagaatctcacgatcaagcgataaaccggcgcggccaagcgcataatacacttgttctaacgcctgattagaattaaagaggactaacgcctgatgcggattgccaactaataacgttaatagctgttcagcaactgcatgatggtactcattgggggctaaattcttttgactaggaccatcttcagcgataaaaaagcgcgcctgttgcttgaagcggaatggactgcgtaatttcttagtcgctagtggttgcgcttcggtaaaaccaagttcacgtttcaaataatcgaagtgcccattaaccgcaagggttgcgccagtcaatgtgactggttcaaagtgcgcgaggatctgttgcatttgcggaccagctgaaagcaattgccactggagcttaaactgtggtaactgactaggttgtttaggctgtgtcatctgaatcattaacgcgtgttgttcctgcggtttcgtcgcaatgaataattgctcaaaccgttgataggcttcaacatccgccaacaataggttgatttcgttttcaaatgactgccaaatccccaaatcaccctctgtatattgttctaaccgctgttcaagccagtaacgcaacgcgagaaaatgatcttgaatggtcaacagttggcggttcagttggtcaaattgattatgacaagcggtgacaaattgaaccacttcatctggattcaaataacgttcactaaacgcttgatgtgcttctggttgcggtagtttaaacgctgtggttaggtatgtctctaagtcactgatggttcggcctaacttggttaagtttttatgcactaaccgtaacgagcgggcttgcggtgattttttcgggaaaagccgggctaaattattattggcctgttccggatccgtatattgcaaccctttttgagaccaaagttgccaacgtgaaagtgaccaatcttgttgcgcaattttttgaacattgaaaatcatattttgtgcttcatctaagaccaagtatggtcgcgcaccccaggtttggtgatcattcgcgtgctctgccaggtaggcgtggttggtgacgagtaattcggcttgttgctggcgcttatgcaggcgacgtaagaaatcatcttgataaaacggcgcttgtggttgcagacttgttaatccccggtgttgcacgttattgaaaaatggtgtttggtaactcgttaaattgagttcatccaaatcccccgttgttgtttgggttagccaaactaagattttcatctgaagcaaccgcaccatgcgattcttgtgtggtaagcgaagtgataattcaaagcgatgcaaatccaaatagtgacgcggactcttaacgatttcggcattaatttggcgacctactaatttttcaagaagcggtctggcctgcgttaaaatctgatcctgtagcagcgttgtcgatgttgcaaccactaatttgtgttcaggcgtcatgcgataactataggggagtaaatacccgatggtcttccctaacccggtggctgcttcaattaatagtggttcaggtgcctcagattcgaaattatcgtggatcatatccatcatggcagcttgcgctttacgccatttcaagtggggttttaataatcgttttttatcagcttcttccactggataatcggccgcaaaattagatcccggatagattttaaatgattcctcggctggttttcgtagggcaatgttttcacgaattaagagatcgttcggcagcggtctcgattgcgcatgcatctgctcggcaatcgctgtgaagaaatcccctgtttgacgtaacaagcccgcgcctaacgcactaagacgttctagggtaactaatggcagggtcttcatccgtgccattaattttaagaataatttagccgttaccaaggcatcgctgtcagcttgatgaggattgtcatgttcgatggcgagtaactgtgtgaggtcttgtaatcgatagctcggtgcttccggcaatacgatctgagccagttcaacagtatcgatacccggcaaatcaagtggcggttgccccacgcgttctaattcgccatttaaaaaaggtaagtcaaagttaatattatgggccacgaaaacagtaccggataagagttcaactaacgttggcgctaaatcttcgaaaatcggtgctaattcgagttgatcagcagtgatatgcgtcaaatgttgaattttagtcggtacgtcgcgaagcggattaacatcttgcgaaatcgtctgaatgattttgccgttttgaatgagggcgcatccgaattgaataatgcggtccccttctttaatgtttgtgccagtcgtttctaaatcaacgacggcgtaaattgtctcttggttcatgctgtcaccaatactttactcattattatatcaatcatactatgaatgacgcgtagaaaccagtctagttaatagcgactagttggccaatcgacaatagatagagatatttagcggttaccggccggttagcaatttgcgtcaacgcggcactgtataggttaatttggccggcataccgcgctttaatcgcctcaatggcagcttctggatcagctgggttcacaaaatcagtcttatagtcgaacaaaatacagtcggtatccgtggttacataaccatccataatcccatggattaagacattgtcttgatcttctgggcgtaaaccggcgaataaggatgcagccggtaacaatagtgaaaatgggacttcccgatgaacttgcgctggttcagctaacagttgctgacccaactcgctctcgaagaatgtcatgatagcagcaactttaatttgttgtgcaacattggcagtgaggcttttttgtaaaacaagtcggtcgatgacactttgcacccgatcgatcgttactggttgggttaaatcgatttcttgtaagaccagatgcgtcgccgttccaatttcagccggactcgcttttcgaacagtctgcatgaattgtggttgaggtaattcatcggtcacgtaacgatgggtttgttgcggtgtatcagcgtcaaagcgtaattgccccaactgatcattgtcgggatcttcaaagagccgtttcacttctgaaacagactggtaagctgtcgtttcggtggcgccttttgctggataactgaatgttagctggtcttgaatcccgttggctaaatcagttgttaaatcgaccgccttgagtgccacttgttgttgctggctccaatcttgatcatggtgtaaagcacctggtaattcgccaaggcgcgtttcacttgtaaacgttaaattaaattcagttgcgtcatcgctcagaggtaggaatggtgtcccctcttcggtccaatcacgggcttgcggatgacgaattaagctcaatccaatccaatctagtaagttcgtgctagcttgacgaacagaagcgtccaaccgcagatcaggattttgctgtcctttttgccaagttgcaaatagtttcgcttggttatcacaactgcccgcgataatcagccgttgctcggcacgcgttaaagcaacatagagttttcgcatttcttcagcgcgtaacttttgccgtttttgggtcgtgatggttaattctggtagtgttggaatctttaaccgttttttcgcgtctaagtaaacaattccgagtcccgattgatcatcgagcacgtaattttggcgcaagtcttgctcgttaaattggtgattggcatccattagaaagaccaccgggaattctaagcctttactcccatgaatcgtcatcacagagatggcatcttgattggcgagactggttggttgggctaaatccttatcttgtttttgcaaacgttcgataaattggatgaactggaagagccctttaaagccgtttgcttcgtaagtcgcagcgcgttcatagagtgcgtgcaagtttgcttggcgttggcgacctgctggcatcccaccggcgtaatctaaaaagccggtcttttggtaaattgtccagattaaatcaacgagtggccgttgacgtgcaatggatcgtaactcatttaataaggtttggaaatgcgttaatttttcgaagacttgttggccgagttggccggatttttgtgcttcgaactgatcaagataattaaaaacggcttggtaatagtcatccgttttatcattaatccggattaatgcgagttcattttcgttcataccgacaattggtgaccgaagcacgctaaccagtggaatatcttgattgggattatcaataattttcaagaaagatagcatgatttgaatttccgttgtttggaaataattctgcgcatcactaatgacaatcggtaagccgaaccgttggaaataatcaagaatgattaggttgttgttgcgcgttggcgtcaataagacaatatcttgatagcgaattggccggatttcttgcgtatcccgatcccagatggtttcttgattatcaatcattcgtttaattcgctgtgcaactgatgcaatctgaccttcagctttatcaagcttgcccgttgattcttcatcagtcggttttgtttcgtataaaagtaattcagttggctgagttggttgatcgtcaggataataagtcgcaccatattgcaattcagcgttgtgatcgtaatctagctgccctaattggcggtccatgatttgtttaaagactaagttgacgaaatcatcgatattacgccgtgaacggaagttttctgcgagaataatgcgttcactatcgttatctggcttggcgaattcgtcgtacttaccgaggaacaaactcggatcagctaatcgaaaggcatagatggattgtttaacatcccccaccatgaagacgttgcggggtgcttgactagcgatagtttgaatgattgtttcttgtaactggtttgtatcttgatattcatcaaccaggatttcactgaatttattttgatagaacgttcgtgctgcctctgattccggagtgtcaccggacaaaatatccaaacagaaatgttctaaatcgccaaaatctagtaaatagcggcgtttcttctcagcttggaaggcttgcttaaaatcgcgggtaaccgtcactaacttaccgactaactcaccagcgcgccgttgaatctgactggtttgtgcttcgtcaaagacaaaataggttgttaaaagatcgtttagtgcccctttgacattatcgagggcgtttttgatccggtccttgtcatattgttcattgggttctaatttcttagttcgtttggcgggtcccaattgggcgtcggtcaattgtgtgcgccactgcgcccaacttaaagtggccgcgttggcttgaatggcagttagtgctgcttgtgccgttgcgatagttggcaagtataccgcaaatttctcgtttgtttgacttagttcgttggcgagtgccaagtcttttaaacaggttgccaaggtcgcttctaactttggcagaatcgttgttttgaaataagcactggttgttaggccagtctctggtacctcgtaaggggcggttagagattgtaaccattcatcgggcgctggattggcaccagagaagttaaacagttcgaaaacaatgttggttagcccatcatcgttgcgatcgttcgaaaaattttgcgctaaatcataaaataaggcgtcgtttgactggtaatgttcttcacgaacgcgttgccaaacttgatcctctaataagagacgttccgcagtatcacttaataaccgaaacgcgggatctaacttaatcacgtagtagaaatgtttaatgacttgtaagcaaaacgcatgcaacgtgctgatttgtgcggtcgggactaggctgagttgctgccgtaagcgttgttgcaccgctttgtcggttgcctcgcttgctttttttcgcagtgccgtttgaatccgttggcgcatttcggatgcggcggcttcggtaaacgtcaccaccaatagtgaatccacatcagtgccattcaagattttttgaatcacgcgttcaactaaaacggttgtcttcccggagcccgccgaggcagaaacgaggatatcatgccccgcgtgatcaacggctgcttgttgggttggtgtaaatcggcgatcactcatgtcgttcttcctccgagttcataattttggctaagacggcttgattatcaagcgcacttaattggcgataattattttctggtaacatcgcatcgaattggaaaatcgatttatatggcgacattgtgagtgcattcgtgcggtcgggccgcataatcggattcaaagcattttcgccagcaaaaatcgcttcccccgctgttttgattagttgatcgttatgggcaattaattgctgtaactcatcaagggtgaccagttgtttcgatttgaatgccccactctttggacgattgaagttaaacagtggtgaatagccactttctaaagctgtatccaagttttcgagtaaggtctcatcgtttaaaattaagccatcatacttaaattgatccagtaataattgatcgagttcgcctttttgtagttgagcgagtttttgtttgttcagttgcttcaatgacattgttgggttttgaaggtgcagataaaaggccccggctggttttaccttgctttgcgctggtaaaattgctgcttgatcttgcaagacagtttcaaggtatgtcaacatttgcaatgccaaaccatagtatgcatcgcggaagctaaagctgtgttgactggatttgtaatcaacaattcccaggtaggcttggtcgtttaatgtcagttgatcgatccggtcaatttttccccgcaccttaacccgacgttgattgggtaattcgaattctagaccagctaatccttgttgggcaccaacttggccgaataagacttcggttgccaacggttttaagttcgttcgttgactctgatcgcgcaatgtccggctgacgcgtttaattgtttgactcaattgttggcgaatgtagcccattcgcgctgatttattgaggatcttaaattctggttgttcatacgctttttgtaagatttcatccgtcaatgcatcgatttgttgattatcgagatcgggtaagactaagcgttgggcttgaatcatcttgataaattgatctaagacttggtggtagaaatcaccggtatttgcaggtgtcagttcaaaaattgggcgctcgttcagttttaagccgtattttaagaaataagcgtattgattttgatagaactcttctaatttcgagatcgacgtatggatttcattgccatataacccagtgacaatatcgcttgtcagtgcaacgggttggttatggtacgccagactttgaaggagttgattggttaagtagtgactaacaggaaattgttgtaataaacgataaacagtctgccattggtcaggaattagtgtttgcgtcgcttgtgcttgtcgcgcaacttgaatcaaatcgcttaacaaactacgccaagaacccgtaattggcgctgtacttgtcggaatgacttctgctagaacgcgttgctcggttaaatggaagtagtttttaatccggtcgacatagggggataccgtgtagttcgccccttccccattattcaatggataagtgaaatacaatccttcagtaccacttaaaaaggccaagtagttcagataaggttcaaagctcatctgactggcacttggatcagttaagaattgttctgaattgaaccgatcggttaatagttgccgatcatggtcggataataaggcgctggtttcaatctgatcaggcatcacttgatcggtcgcaccaatcataaaggtaattttgcggcgtttagtctgcaccatccctgattcagataaaacgacctggtcgagtgtcgatggaatttgcgcatattgcgccgtattaaacccggccgctagtaaatcccaaaagccctttagttcgaaaggttggtcgcctaataacgtcacatattcatccaacatcgtcataaatgtttgccatgtctgttccggttggccagctaaggcaatttgattggctgcgagtgcttggtcccgccaatttaacaattgtcgatcgacaccttgttcgattaagaattgatagagcactttagcggcatcgcgccctgttttggcactgtctaaccgtttataaaatggtggtaatacggattgaacataatgccgaatccgattgatccgttccgtgagcacttcatcttctgttgttcgaacaccatcttggaaggaaccgaaccgataatattgccaatcggctgcgcttaaccaatcatgcccttcatacccactttttaaaatcagattttcacacaaatcaagatcagcccggaattcagcgactgattgatagtcatctggtattaaaagctccgtcttcaaaagcgccattacatcttcatagcggtagtaatgctctttcacatcaaacaacgctgccaacatcgcaacaagtggatgggccgccattgtttccggtaaatcgcagaagtacggcacttcgtattctgtaaaaatcggcgcaatcattgtttcataaggggctaaatgccgagtcataatcaagaagtctcggtagcgatagtggccggtttggactaaacgacgaatttcacgggcaacataccgtaattcggtataccgattttcggcaccgatcacttgaagttgcgtcgaatcgatttccggtgctgttgggatctgaccgtggttttcagaagcaacccagtaccgatcaagcgcgagtaacgttggtgaaacccgctggttagtggcaatctgatcagtcatgatgggaatgtgattttgcttggcctgttggtataattgataatacgtacgctcagcttgataaaagaagctgagtttttccggtggttgttggtaattaacatagtcggtaattaaggctacggttaagcttgcttgctgcattaagacggcgactagcgcttgttcttgagccgtgaattgtgcgaaaccttcgatatagaaatgacaatcgtgtaagtcttgtttttttaaataatcagttaaggcatcaattaacgtcgtattttcgatgaattgcttttgcatagcggcttcaaacgccgtggcaataatggttatttcccgcaatttagtagtcagttcgacttcttcggccgctagctgggccgcaatctcagttagctcatcgggtgtaatacagcccactttaagttccaatagttggctcgttaattgagcaacaaagcctgtttgattgacttccccaccaaataagctgagttcttctgcatgttcttgcaagaggcggtagacaaggatgtttaacccggcggttgaaatccgcggaatctggtagtacggggtatttttcatgaaataccaagctaatcgacttaatgagaagacttggacgcgtgaggttgcgacatactcacttccaggggtttttaggtcatttaaaagtgcgacttcagattcaaatttgatatgattcgggaccaaataaaaaaagcggtccgtgttggtggccttaaggtctgtttgtagttgcttgactagtgtttgatggtggtcataactagctgtaccaataataaattttaagctcatggcgcccacactcctttggcgtcattttaccatagatagacaagtgattgggataaaatccggctagtccgttggtaaaaagcgggtataataggaaacccattaacctgtgcccaatttgatttatgtggcggtcatttttgttttgcagtatagtagtaagggtatcttcaagtcagaaaaagagattaagggtgattgtatgcagactggtgttggccaaagtcatgcgaaaattattttaattggggaacacgctgtagtttatggacaacctgcgattgccctccccatctttgcggttcaagcgcgggtaacggtaactttcgagccggcactccagacaccgcaaattaagagtacttattacaatggtcctctagaacaggctgttggtcagatgcaaggcattcgccggttaattgaacaactgtggcatgcattagatccgaacttaaccccgtttgaattgacgattgaaagtgacttaccgcccgaacgcgggatgggttcttcagccgcaacggccgtcgccatcattcgagcgttatttgcgacttatcatcaagagctcagtcaacaacggctgctaaagctagccgcgctctccgaaaatttaatccacggtaatccaagcgggattgacgccgcgacaaccgacgcaactacaccattatggtttgtcaaagggcagccgcttcaacccctacccattaatttaaaagggtatctcgtaatcgccgacagcggtcaaaaggggcaaacaggtgccgccgtcaaaagcgttcagaatcaaatgatgtccaatccagaacaaacgcaacccttaattgaccatttgggttatctaacgcaacaagtcgcaagaaatattgcccaaaacgaattaacggtacttggcgcgaacctcaaccgtgctcaacttgatttgcgggcactcggtgtcagcaatgcccgtgttgatcatttgattgatgtggctaatcagaccggtagtttgggcactaagttaacgggtggtggccgtggtggctgcattatcgccctggccgctacgcaaagtgctgcggatgatttggcacaagccttatcagcagctggtgccatcaaaacttggattcaaccactacacgcactttaaaaaaaattaggagtattactatgggacaatcaattacagccagagcacatacgaatattgcgctcattaagtattggggaaaacaaaatccggaattgattattccgtataacagtagtctttcaatgacgctagatcatttttatacagatacaacggtccgcttttcaactgatttgactgctgaccaaattagctttaatggtgccattgcggataccaaaactagtacgcagatgagtcagtttctcgatttaattcgaaaacaggcgcatctgcctttatttgctgctgtggaaaccattaatcatgtccccaatgctgctgggttggcctcttctgcttccggttatgcggcattagctgctgcaggtagtcgtgcagctgggcttgaacttaacgatcggaatctttcgagattagcccgccgtggttctggctctgcaacccgctcgatttatggtggttttgtggaatggcaacgtgggaccaatgatttggattcatacgctgttcccgttcaagaaacagttgattgggatatccagatgattgcgattgtcttaaatgatcgtcaaaaagccatcgccagtcgtgctgggatggcgaatacggtggccacgtcgccctactacccagcatgggttgaaaccgctcaagccgcaattccggcaatgaaggccgcaatcgttaagaaagatataaatttggtggggcaattagcagaacaaagtgcgatgcagatgcatgcgacaacccttagtgccgtcccacctttcacctattttgaacctgaaaccctacaagcaattaaagtcgtgcagaccttgcgccaacagggtgtttcttgctattatactatggatgctggtccaaacgtgaaagtgatttgtaccagccaggaaacacctcagattttagcggcgcttgcgccctattttagtcctgaacaactccttgttgctaaaccaggtcctggtgtgagctatcgataatgcaaatttaagttaaacgtgaaaggttctgatggtttgataacggctaaagcgcccggaaagctgtatattgctggcgaatacgcagtagtagaaacaggttttccggctattatcgtggctttaaatcaatttgtgacagtcacaattgaagagagtcatgaatatgggagtattgtgtctaaacaataccaagaaaattccctttattggcaacgacaaggtgatgaaatggtttttgataaccgcgataatcccttccattatattttgtccgcgattcgcttaacggaacaatacgcacgtcaagcgggtaagacactgcgcatctaccacctacgggtaaatagtgatttagactctgctgatggtaaaaaatacggtttaggcagttcagccgccgtaaccgttgcaacggtaaaagcgctctgcgccttttatgaattatcactatcaaacgaccaattgtataaacttgctgctattgcgcatttagatgtgcagggcaacggttctttaggcgacattgctgctagtgtttttggtggctgggtcgcttatcggtcatttgataaacaatggcttgctgacattcgaccaactgttagtctaacggagctgctcgaaatgccatggcctagtctttcaatcgaattattaacaccgccagcagagttgtcactcttgattggttggacggggtcgcccgcttcaacctcgcacttggtggataaaattgcccttgctaaaacagaacggcaagccgattatcaaaacttcctcgcagctagcaaagcttgcttagaagcgatggtcgaagggtttcgtcgtaatgatttagcccagatccaagctgaattacgccacaatcgtgccattttacaagatctcgctcacttcagtcacgtcgctattgaaacgccaatattacagaaaatgggcgcattagccgagacaatcggcggtgctgccaaaacatctggtgctggcggtggtgattgtgggattgtcattattgatcgcgctatcgaaacagaggccctctttgaacaatggcgggccaatcaaattgaacgattgaaccttgcagttcacctcgtagattaggagcttacccatggtcagacccaaacaatccattcaatctcatcggaaagatgaacatgtctttttagcggaaaaattccgccatggtgatgccatcaatgactttgatggaattcggtttatccatcaaagcttacccgaaattgcggtatccgacgtggatatcagtaccgattttgctgggactaactgggccagtcccttttatatcaacggcatgaccggtggtagtcagcagacaaagaaaattaacgcacaattagcgcaagtcgcccaaattaccaacctaccaatggcaactggctcccaatcggtagccattaaagatccgtcactagcggatacatttagcgtgattcgcgaattcaatccccacgggtttgtactcgctaatattggtgctggtaatgatttgaatgtgtctaagcaagccgtcgcaatgacccaagccaatgccctagaaattcacgtcaacacgccacaagaaattgtcatgcctgaaggtgatcaagatttctactggttagacgagattgctaacattgtcgccaatgttggtgtgcccgttatcgtgaaagaagttggttttgggatgagtgctgatacgattgcgcaactcaagcaaatcggtgtacaattcatcgatgtttctggccgtggcgggaccaactttgtcacgatcgaaaacgaacggcgtcatgataaagcctacgattacttagctgattggggccaatcaacggtcgaatcgctctttgaatcacgcgctttccaaaatgacgtcaacatcctcgcttcaggtgggattcggaatcccctagatatcattaaagcacttcggcttggtgccagtgctgttgggatttccggtcaattcttgcacatggttttaaaagaaggcccgacacaaatggcggaaaacttgctcacttggcaagcgcagattcaagagattatggcaatgcttggcgcacgcgatattcaagcgctccaaaaggcgccaattattctctcgcctgaattacggcattatttgaatgaacggcacataacattttaagcagcaaaagctcggtagaaggatttcttctaccgggctttatttgattgcttaattagcaactacgactttgccaatcatttggttcgtttcgaccagttgatgcgcttgccgtaagttggctgctgaaattaggcttaagcactttgtcagggttgattgcaatttgttttgttccaataaggttgcaatctgtcctaagataatgccttgactcgctaaatccgttgtttgatagtaggtctttgagaaaacccactcccaagcgaactcgacccgttttttagttaatttttgtaaatcgaccgggcgatgattttcagtgattgaagcgatgcggccattgggcttaatcaggcgcgccatactctcccagtgttgatcgatgttattcaactctaatatataatcgaccgtttgatagccgagtgcgtgcacctgttcaatgagtgattgatgatggttaacgacttgatccgcaccatgggccagcgcccacttttgcgtttccggacgggaggcagtcgcaatcacgtgcaatccggccaaatgtgccagttgggtggcgatcgaaccaaccccacctgccccattaatgattaggatggtttgatcatgattagtggttcgatcttcaaaatcaatgtgtaatttctcaaataaagcttcccaagccgtcagcgctgtgagcggcatcgcggcagcttgcgcgtccgttaaattctgcggtgcttttgcgacgattcgttcatccactaattgatattcgctattactacctggtcgtttaaagtccccaacataaaagacacgatcacccggtttaaataacgtgacggcattgccaattcctgtgacaatcccaacagcgtcccagccaagaatacggggcgtttttgattgtcctctacccccttttcgaacgccaacatctacagggttaactgatacagcggtcacttgtacgcataaatcgtgtggttttggtttgggactggggagattaaaagccattaaactttcttcatttgtaatcggtaaatgtttggtaaaaccaattgcttgcattaaaaatgccttctttcttattcaccattagtctaaaacattaattgccccgtaacaatcgtatatcgaatgtaactagttacattgttttcactaggcaaatgactgctagcggactataatggcggtatcaaaggaggccatttcatggttcaagaacggcacatttatgattgtcaggcgggctgcccggttgaaagcacgcttcaaattatctcggctaaatggaaaagtgtgattatttatcaacttttgcaacattcaaatctccattttggtgatttgacgcgcgctttacccgattgttcgcgccgcatgttagccctacagctggaagaattaattgcggatcatgtgattactaaaacggtgattagtctccggccgttaaagactgaataccaactctctgaatttggtcaaacactgagtcccgtgattaacgcaatggcaacttggggaacttattataatcaggttgcacaacaggatgttggatactgtaatttgcagtaatgcctaaatttggatattcgctaaagcacttgacaaattaacttggataatgtaaaaatatagttgttaaaagtataagtaaactttgataatgaagtggtgcatattgaaagaaacgaattatgtcgaaaataaagtctatgaataccgagtactccaacatctttctcaagaaaaattaggtcaagcggttggtgtttccaagcaaaccatctatgcaatggaaaaaggcaactactcacctagtttgattttagcctttaagctcgcacgattttttgatgtaccaattgacgttctattcacttatcgggaggcgtaacaatatggccctactacactttttaaatcaaaatgcccatgtaatcgctggtgtggcaatcggattaatcatcatttcaattctgtttttctactatggtataactagaattggacgttcggatgaacgctcacagcttattatgtatcgcgtttttaaaacgatgtttgcagcgtgtttattatcgatgattttatttatgacttttgtgccagaccgcttaacagcagttcgagattggtttataactctattcagtcttgtatttatcagtggcgcatgcgctgtttttattgaaccacggcgtaaagtttaacccttaaaaaaaacggtttagtcaatctaatgactaaaccgtttttttaatgtgttgtttttcgtccttttggaattaaataataaaagataccgattaagatgagatcaatgatcatcaatccaataaaaatcgctgttcgacccgttaggtaaaagaaccaactaccaattgagaagccaatgattgagctaacaactaggtgcagcgcaaaaatttgggtttgtgccacgcggaatttacgatataaaccagtgctgagccctttttgtgcgtgataaccattgataacttggctaaataaataagtgaaaccgaccgcgatgatcatgaggacggcaattaccgcgattacacccgcattttgacggagccagttgacgccgactaacggcgtcgtcttcggtgttaaataactgtgcttagtcgttttgaaaatcttttggtaagttttcagatgcgctcccatctgcggaccatcaaccaatacggtgactttattcagtgggcgatcatttaatacaaattctggtgacgtggatacaaaaatgtgctgatcaagcgtagttgtctgattcgtaccgacaacgccaatcacggataagtagcgaccatgatcttgataatacgcttgactagctggtttgtagagttcagcaagtcgtgattgaccagcaacgacgactggaatctgtgatttgaaatcgtaactggagaagaaccggccgtcttttaatgggacactcgataacttccctttcgcatagacatatgagaaccgggaatcaacgttgaattgaatttgaaaatggcttaatttcgcggcatcaattttttgaatggttttttgaatcgactgttgactcttagaattaaaaatcacagcattttctgataaactattgtgatttaagcgttggctatagttagtttttgcacgttggctaatcgttaacatgcctagaactgttaaaccaactagtaaacaatctaatattatttttttcaggcgcacagtgggccctcctttaaagcagactattgaatccagtaaaaccgatcacgcattaaatcgaatgggcgtaagtaacggttaatccgtgataaacgggcgtcgttgtgataatgggccgccgtccaaaaggcgtgactattcgtggcgccaaaacgttcgcctaagcacaacaaaatgggggcatttggcattgcacgaagttgttgcagcaattcataatcaactgggacgccgttgggtgaccaggacattaagactgcatcgacttgcggaccatatttttggaccgcttgtttggcgtcaagagctgccactgacgtgactaattggcgccctgtttcattctcggcagtccaggctaaactatcggtacaaatcacatcagcgcctgcctgccgtaaaccagcacttaaatagccgttaccagccatgacttctagaaaacgccaattgggaaactcgcggacaatcgccgccgtcaaatctgtagtgatataggcccacatgccaaagcgattttgcaaatattcacggtaattgcgcagtaagtggtcgattaactgtaactgacgttgaacctcagccacactagcggcgctaaaagccccctgttcaacctggagtaatatttctaaatacagagattcatcaattcccaaaacgggtaaattatgtatgggcaagccgtcctgttcaatctgcaataaactagttaaaacagcatgaatttgtacttgaatggctgggacggttgcaaaaaagcgttgactctggcgcaatttctctggataacttaactgtatcataatggattccgtttctaatataagtttcccttagacgattagaaaaaccttcccaatcggaaggccaaatcgaacgttttaacgaatcccgagtgcaatgcgtgcataacgggacatcttgctggtatcccacgctgggtaccagacgagattgactttaacttcattgacttctggaattttgcccattgcttgatgaatcgaatccgttaaaacatcggttaagggacagcccatcgttgtaagggtcatatcaatcgtacataagccattttcatccaggtttaaaccgtaaaccaagccgagattcacaatgtcaatcccgagttctggatcaatcacggtctcgagcgcggctagaatccgttcctttaagtcttcaattgctgcatcatcttgtggttggtctgccatgtgtcctgcctcctggtcactctaatagctctattatactggttcaaccgaccagttacaactgacgatcattgacaacaatccgcataccccctagaataaaaagacatatcgtgttttaaccaaacacgtttttaaaaggaggcgccgctatgcatcaaaaattgattgcactggatttagatgggactaccctcaattcagatgcccaaattacacttaaaacgcaacaaactttaactgaattacaaaacgctggccacattgtcagtattgtcacagggcgcccaaatcgtttgagtgaacctttctaccaacaattaggtttaacgtcgccaatggttaactttaatggggctttaatgcacattccgggacaagcctgggccggtgaatatcaatatacgattaataaagacattgtctttagtctcttccaactaaaagaacgctttaagattcaaatgattgccgccgaaggtaaaacgatgtttttagctgatcaagcttatgccaacacgttttctttcttccccacaacgttgaagtccgatgaaattttaacccgcgaatcgcttcggcaagacccagcggccgtcacggtttttgtggaacgcgctgatcaagatgcgttacgtgctgaaattctgcgccaattccctgacgtttccgtcaacacttggggtggtcctgctagcgtcttagaaattgtgcatcatgggattcacaaagcaaccggcctcgcaaaactagcggcacactacgacattgatcaatcagatatcattgcctttggtgatgaaagtaatgatttggatatgttagcctatgccggtaccggggttgcgatgcaaaacgcaattgcaccgatcaaggcgattgcagacgacatcacaccactgacgaatgcgcaagatggtgtggccaattatttacggcaatattttaagatggattaatgaaaaagcgattcgacaatttctggtcgaatcgctttttttgatggatgaaacgtgcttttcaagctaactttctgtgcttagctacatccgtcaaatcaccgattttgtcggtaatctgcctgattaggctaatcctcagaagatacccggcttattgcacactctattctgaaacgtgctccgtcagatatacacttccggttagttacataccgcaaacgatcggctacgccgctcattcacggtattagactaatcctcagcgtatgaccatctgacgtcgcactctatttttcgtcgctctttagcacgccgcctactgagtagtggtctggttgcatttcgtttaggacaacgtgcacgtgttctgcaggtgcgcctgtgtttttagtgattgcttctgtgacgtctgcacagagttgttttaattgtgcttggctccggccagcgattaaatcgatgtgtactaatggcatgtgtggtgcctcctttaattgaatacttatattatgcctgttttaacgcaattgagcaacggtaattactgtgtttttaagcaaaagaatgtataataatagctaatattgatttatctatggaggcattacaatgagtgaacccctttaccgtcaattgacggcctgtaccagtgttttagttggtaagaaagccactgcagacggctcaactttaatcgcacgtaacgaagatagccaggcagcttggcctaaacatttaaccatccatccccatcaaaagttaacgactgccccgcactttgtctcaaaagacacgggtttttcaatcgatttaccacttgaagccgcaaaatacacggcgacacccgaatggaccgatgaatatggactattcgaagaagacggcattaacgaatacggcgttgcgatgagcggcaccgaaagtgcttatagcaacagtcgcgttctcggctttgacccctacatcgacaacgggattgctgaagaatccatgattacagtcgtcttaccttacgtgaaaacggcccgtgaaggtgttgcgcggctaggcgccatcgttagtgaatacggcaccactgaaagtaacgggattctcttttccgatgtcgatgaggtctggtatcttgaaatcggcagtggacatcactgggttgcccaacggattccggatgatagctatgccgtggttgccaatcaactcgcgattcaagaagtgcaattcgatcaaccggattggttcatgacttcagacgggattcaagattttgtgcgtgataatcacctatggcaagctgatacgccatttaacttccgcgatatctttgggaccaaagaccaaagcgaccttgtttacaacacaccgcgcgtttggtacggtcaaaaattgttaacgccatctgtcgcacaacaacctcaagactttaacctccccttcttacggcaagccgatgcgcccattcaagtcgaagatgtcgcgcgaattctaggctcgcattatgaaggcacggtctacgatccaatcggtcacggcacaccacaagaaaaacatgctttccgcccaattagtttagcaaagacgcaagaatcacacattctccaaatgcgccctaacttaccggtcgatgtcagcgggcttcactggttatcaatgggtgtcacggcacaaagtgtctacgtgccattctatgcgggtgccaatgacgtcccagtcaattaccaaaaagggacaaaggattacagtcaagattcgatctactggacctataaattagctggtattttggtggatgcacactacgccaagttcgccaaggacttggaacaaacgcaaaaacacatcaatagcttaatggttcaaaatatcgtaacaaccgatcaagcggttgctgctgaaaccgatgcggtccaacgaacgatgttgatgaccaagggctctgcaaaagctgcgcaacttgcccaacacgaaatggaacgcctcaccgcaaaactgattacggatagcgcgaacctatcaccactcaactttacaacggatagtaatttatagataaaaatggccccacatcgtattttgatgtgggaccattttatttactcagcaatcatctctctaatcttgtaagttccacttgcgtgtctaacttctacccgataaggatgtccatggacaactgatttagaaggagtaaatacatttccatttagggaaccatagtagttttggccattggtgacttctgccagatagctgttgtttcctaatacgactatcttataatgcttaaataattcgttagcaaaggtaacgacgattttattatttttaacactcatgtcagcaactaaagtgttcaagaacaattgctgtgcatggttaattctttgagtcaatatcgtcttttccgagcccttaactgcgttaatttgtgttcgtaattaatctaataggtcttgtgtgacctcaggtttcaactgatcgtttgtttcaaataacgcttcaacttgacgtttcagaagaagaatatcctgactaatcattttgagaatgtaagacttgtgcggtaattcagccactacggtaacaacatgtgcatccgcttggttaggaattgttaagacattatcgtcgagctgaccaccactactgataccatttttgacctctgcaactggttggtcgtcaacaagtaccttaattttcgcatagtctttaaacttctcatcagtaaacgataccactaatgctgattgtgaatccagttgaatatctttgactaatgtagctaggtatttgtcttctaattttgtaaatagttctaagagtctttctttatagtcaaaagtagaaggaagagcatcaattcgatttcggagagcatctagtttagcttgggttagaattgtaccaatcggttctgatgcattcaaatagtttaataactcttcttcaagtgcaatactatcaattgagtgttcatatcatttaaaagtaccatttttattttgctgttcaattgtaatcacatcagtcggtttaagcatctcgattgtttcccaaacattatttgttaacatactttcaattggctctttattgacgagtttggaaatcacttgtccattctttttaaggattaattgctcatccttaaatacatcggtttggtagtcagtcaggttaacttgaataccgtggtcattcagcgatacggtatcgattaagcgcatgggtaactgtttattagtttctttatcatttaaccaaatagcttctggtaaaggtgctaattgactaatttcagctttaactgctgcggaaatatcaaatccccattgttcgaaataaggctgcatattataacccgtaattctagaaacatttagaacaaagttttgcatccgttcattgtctggtccaaatgcaagcttgttttcacgatagtattgatgtaaaacggggtaaaagttatcaccaaatgtatttcctaattgaccaaacataaccatctttaaattattattttgtgcgttgaattgcttattatcagattttagataagtatgcatttctgggtagtattgatctaacgatgttattttaccagtcaattctttttgagccgctaatgcataaatgttaacacttgattctacaacagcaccccatttccaaggtgtttgttgtctctgatgaccactttcatgccagatgctccaaccttcatttgtcttcagtagtcgttgcaaagcgcgatcattatggaagcccataaattcattttctgtatacatatacaacttaggtgactctaagaaatgttggagatggcgatcaacaaagtttactggatttccttcagtagtaatgcctgaaacccgatcttgtgccgttaaaaaccgatcataataagtcatcagttctttagggtcaccgagatattttttagccattgcgtaactaactgtaattaatgctttgttactgaccaactgcacatctttagcattcgtcatttccgccatttgtttctcaaagtctgcgacgctagtttgatttaaatcgaaatatggcattgatcctgttgcccctgatattgtgattgttgcttcaccagaatcattaggattagtcacataaatcgggccctcgttttcaacggtaatcgttgtaatgccctttgttaatagatattgtttttgattttctcgttcgggcgaaccaattgtgatagataatgaatcttgcatcccctgagcaactgtcaaaacatcccctttttgggcgtataaaccgctaggctctaaacttgagtagcgtaatgttctgcgttgccggtctttttctttaaaaacatcaccacgaccaatataggttttcatttcttgtggtgcttttagattttgctggtgcctcaccttggatttgaggctatctgctagcacgctactcgctaaattttggtgattgtcacttggttcagccttaactgtttgtatagaactgatggtgctagttgttaggattcctaacgctaaaattccgattacattcttgatagtctcatcccctaaaagtattattatttttataacatattcagattagcatggactgctgaaaattgtctattaaaaaaccctaatgatttctataattattctattaatattaaaaatgtcaataatgataactacaactattacatttaagaataaatcgctctataattgtgatgacagtgtttacaattgtgtaaaataaaataagacccaccacttattaagtgatgggtcttattttattcagttataaatgtattataatgaacacccttattaaagtaattccgctaccaatggccaattgatcatcttccaaaagttttcgatgtaatcaatccggttattctggtatttcaggtagtacgcatgttcccaaacgtcaagtccaagtagtggtcgattacgactcataagtggtgaatcttgattaggcgttgtcatgatttgtagttcaccattttgatcgataacaagccatgcccagccagagccaaatacaccaagggcagcttcggtaaatgcttcttggaacgtcttaaacttcccaaagcgggcttcaatccgttcgagtaattcccccgttggtgcttctggcgcattcggtgttagaattcgccagaagaaactatgattggcatggcccccagcattattgcggacaggtgtttgaagattctcaggtaaatcatcgatgtgtgttaacaaatcatgtaatgatttacctgctaaatcggggtgcttggctagcgccgcgttgagttttgttacataagtcttatgatgtttgtcatgatgcagatgcattgtttcagaatcgatatacggctctaaggccacatattcataaggtagtgctggtaatttaaatgtcattgttcaccctccttgttataacctcatcatacaagtctatggcgttaaaaagcgaataatatgattctacgaccattgaaaaaagctgactaatgtttattagccaactttttttgaatcctgggtagctgcgtatcgatttctgccaacatcatgttcggtgtcttatgttggaaaaaaatggtgtagtccgcaagccgataatactttggtcgtcgtttgtgatacagttcgcgtaaaccatcgtggcccaattgattcacaagtggccgccgatcattgcgcgaaacgcggcgccaatgtgcttcataactcccatttaggaaaaaaatggggatatgactctgttcaagtaaatggcgcgtctgagcatcatccacggccccgccgccggttgcgataatcccatcgtgttggatcaatgtctgtaaggcctcaaattccatttgtcgaaatgcagcctgccctttttcggcaaagatttcgttaatcgtcatttgctgttcttgcatgatgtagcgatccaaatcaatccagtcacaatggtaatgatgtgcaactttgcgtgcaatggtcgttttaccagaccccataaaaccgattaaaatcagttgcatctagtcaatcaacccctatggttctatttcaaatatattgttggttccaagactgctccgcacatacggtcagttaaacactctttacaagttagtttcattgtaaggtatctgtgggttggttaccagttttttttgaaaatagattagccgctaaagtcgttagcggtatggattgaatttttggaacaccaattgcatcgaggtaaacaagattaatggcatctccttgattcttcttatcatgtaaaagttgcgtgaagagtcgatcactcataagtaacgggctatctgtcggcaagccgaccgcatttaaaacagttgtaatcactggtgttaaatgcgcttcagtcagtccactttgttcgactaagtgctgcatggcaactaacccgatgctgaccgcttcaccgtgcatcaggctgccattggccagggtttcaaccgcgtggccaatcgtatgaccgtaatttaataattggcgttgattactttctttttcatcggccatgacaatctgtgccttgtagtgcacactttgctgaattagtgtttcagcctgcgctagaatcatatgcgcactttgaatccctgtcacctgttgccaaaatgtcccaccgttgagtgcagccactttaacgatttccgcataaccggccagtaattggcgttgatccagcgacgttaaaaagtcgggatcaatcaatactaaatccggctggtaaaaagaaccaactaagttcttgccagctggtaaatcaagtgcagtctttccaccgacactactgtcaacttgtgccaaaagcgaggttggcatctgaataaatgcaatcccccgcatataggtggacgcgataaaccccgccaaatcaccgacaaccccaccacctaaagcaatcaccccgtcatgacgggtaaaattcgccgctgccagttgggaataaagtgccattgcttggtcaagtgatttcgacgtttcaccagccggaataataatcggtgtgacttgatagccaacttggattaattgagattcgaccgtttctaaatacaacggggcaacattcgtgtctgtgattaatgcgatttgacgaggtgtccaaacttgcgcgatttgttcagcacagatgtgatacaaaccagattggatccgaatctgataatttttttgtgtgaggtggacatcaattatcaccattagtgccgccactgtttgacgactgcatcaacggcccacacttgatgacacatttcaagataagtagctggctttaaggcttgtgcgccatcagaaaaggctttttctggatgatcatgaatctcaacttgtaacccacttgccccagttgcgactccagcccgagccattggcgtcacaagatcccattcaccagtcgcatgactcggatcaattaagactggatagtgcgttaatttttgtaaaactgggacagcatttaaatcaaatgtgttgcgcgtatagtgattgtcaaacgtccgaatcccgcgctctaacagcataatttgttgattaccgttggcagcaatgtactcggcagcatttaataaatcatcaacagttgctgctaagccacgttttaaagcaacgggaacgttggtttttccaacagctttcaataatgaaaagttttgcatattgcgcgccccgatttgaaaaatatcggtatattgcgccactaaatcaacatgcgtttcatccatcacttcggtcacaacgtccatttgataagcatcagcagccttgcgcaatgctttcaaaccagcttcgcccatcccttgaaaggaatacggtgatgtccgcggtttatacgcgccaccccgcaaaatagtcgcaccgccttctttagcaactttggccatcgccataatgtggtcagcagattcgaccgaacaaggacccgccatcaccgtgaagtctgcaccgccaatcgtactgtgtgctaattcgatgaccgtgttttcgggttggaatagccgactgccaagcacgtaactcggttcatccgtggtggttgccgcaatgacttcttcctctgcttgggtaaaatcaattgcttttgcaccgatcaccgctacatggtgcttaatctgatagacattcggatttgtcgtgcgttgtcgtgcgcaaaaatcatcaatcagcgctgaatcagtatttggtttaaattgaataatcataaattattaaaactccttcgttaaagcatgatagatgggatcggtttgtaggacctggcccgtccagaattgaaaactcaacgcggcctgttcaactaacatgccaagcccgttttgggttggatgaccacttcgagccgctaactgtaaaaaagcagtctgacgtggcgcatatattaagtcggcaactaaacaagtcatcggtatttgaccaattaaaggtgctgccagcggtaatccaggggtattgaccatgccaagattcgtggcgttaatcacgcaatcagcattactgagtgcttgttggagtgcctgttcatcggcataattatgtagcacgatggacatcgaatggtgattagcaatttttgccagtcgttgttcaaccaccgcataagtcgtattttgacgtttgaagacctgaatcgtcgccacaccatagcgagcggcggcttcgataaccgcgagagcagcgcccccaccacccagaataacaatctgctgactagctagattgggatatcttttctgcaaagcgcgccaaaaaccatcgccatcagtattcgtgcctaccaatttacccgatcgtaaagcaaccgtattgatggcgccaacgagttgcgcagttggcattaactcgtccattaatggcacaagcgactgtttatagggcattgaaagattaacgcctgccacaccaagcgtccgaatcgcttttgcgacatcttgcggccgtgcttggctatcgaaaaccagataccgcgcgtcgatttgatgttgtttaaaacccagattatgaatcatgggtgacaagctatggtgcgctggatgcgcaaccaagccgtaaagagctgtataacctgatatcattacgttttcctctaaaactatcatactttacttaatgagatttttaaatggttagtatcaaaaagtcatgcttaatactgttattttttgtcattatccggtaagattaacatagattgaaaacggttaatataatagaaagaggtccttaataatgtcgatcgaacgtcaaacgttatccgttaaagaacaagcatttatagttgatgcatattggttaacacccattccagatttcgagcatccagttaaacatcccgtcatgattatttgtccaggcggtggttttacgtatcattcaggtcgtgaaacaacaccggtcgcgttgcgatttttagcagaagggtttcacgtgattgttctcccctaccaattaataagttcgactgaaaccgtttatccgctcgctttacatcagcttgctaagacaattgagtgggtgactgatcaagctggagaatatgatattgatttggatcgaattgttttgactggtttttcagctggtggacatgtggtcgctacctataatggcattgcgaccgatccaatccaccgagctgattacgggttagacgattaccgtggtcatcatgcagcgattgtcttaaattatcctgtgattgattttgacgctggttttccaattgatgatgcaactaagcaacagattacagtggaccaaactttatggcacgcacaaaaaaatatcacagcagcagctaaaccagcttttatttggcaaacagccacagacgcccttgttccagcaacgaattcacttctatatacacttgcattacagcaacataaaatccctgttgaataccatctctttggagctggtgttcatggcctttcgcttgctaatcatgtgactcaaacaccaggcaaaccagaatatgctaatactgtagcagctcagtgggtcccacttgtattggactggtttaaactgatggcaattttataagaacctaaaaagcaatggatacagtaatattaactgcatccattgcttttttgcttatttacggtctgccttattagcaatacctaattcttgacgatatttagcgacggttcttctagcaactttaatgtcatacttaacttttaactggtccgcgattttttgatcagacaatggatgatgggcttcttcttccttaacaactgtttgaattgcaatgtgcgtctgtgtcaaggtgggaccttcctctaaagttgtactccgtttggtcaacaaattccgcagaagatagataccattaggcgtccgaattgatttttctttaatcgttcggctaattgttgattcactgagctgcaattgatttgcgatatcccgtagaatcaattgattaggatatgcttgttttccagtaatataatcccactgtgccttgattaggacttcagcaaccattaataatgtttgcccgcgcttatgcaaactcgtgtttaacatctgatactcggcatatttttgctgaatgtattgtttggtagcgacatcgacttctttttggaactgcgcgtaacttgcatgttcaaaaatcagcgttggtcgcccaaattcagtcaatagtagctgatatcgtgagccattcatcttaataatgacatctggcacttgaaaattagttggtgagtcatcaaacatatttcctggttcaagactcagtgcacctattttgtgtaaaatcgattgcatgtcatcttgactaatggctaactgagtttgaatttgtttaatatcaccagctaataattgttcaaaataatcagttatcaccaaaatactaagatcatcagccggataaatagcagaggcctgtagtaataacacttcttgtgcatcacgaccaccaaccccgattggatcaagttgttgtagtaacgtcacaacgtcttgataagtggtctgatcaatttgattttcttggataaaacgggcttcatccacctttaaatagccatttggttcaacctccaaaatcagccgttgcaaaagttgctgtaatttacctgctttaaaccgataaccgacttgttccaacaaataatcgtataaattacctgttccgtgagccgctagctgatcaaaattgaattcttttgtacaggcttcgacggacccgacctcaaacaaggggttctctaaactacgagcttttaaataatccagtaggtcgagactattagattgcaaaatttttaaggattgttgcaatgattggctactaagtgggtaaaaaaaaccgttaaccaaccattagcaccctaaaaaaacctaggtcagacaaataatagttgtctgacctaggcttttaaagtgataatttaatcgtttgcgccacagtcttaggaataccgagtgcttcgagttccgccactgaagcttctttgatatgtttcatcgaaccaaaattcttcaagagtttcgtccgcgtcttaggaccaacccccttgatgtcatcgagtttagaactcaacgaattcttcccgcgtaattggcggtggaaactgatggcaaagcgatgcacttcgtcttgaattcgcgttaacaagtagaagccttggctctttggatccaactgaatggtttgatcaacttccccatataacaacgaggcggttttgtgatgattatccttgaccatccctgcaacgggaattgatagccctaattcgttctctaagacgtctttagccgcattgagctccacaattccaccatccattaaaatcaaatcaggcagtggtttatcctctttgagcaatcgcgaataccgccggaaaatgacttcccgcgtattggcatcttcgttggcgcctgcacgatctgtcgtttgcgttaacttatacttgcgatagagtttcttctcggcacgaccatcaacaaacgtgaccatcgctgagacaggatcagtcccttgaatatgcgaatgatcaaatgcttcaatgacgtggccatgtggtaagccaagcgcgtccataatctcatcttgcgccccaacggtcttgcggttgtcgagttccaataaacggaacttctcttccaacacaagccgactatttttctgcgccatttccatcaaagcttttttctcaccacgttgcggcgtgcgaatcggcacattcaaaatttcggtgaggactttcttttcgaccccttctggaaccagaatttcgcggggtaacacattattcttgcggttgtaccattgtaaaataaaggttgccaattcttcttcaggtgtgctgacacacgggaagagccgcttttcacgccgaatcaaccgtgcttggcggatgaagaagatttgaatcgataaccagcccttatccaaataaaaggcaaataaatcgcgcggggtattatcgttagaaataattttctgcttttcaacggtggcttcaatgtagtggagttgatcgcgcaattctgcggcgcgttcaaactgcatctcttcagcagccgtagtcatcttggccgtcagttcttttttaaccggatcaacttgcccattcaagaaacgtttaatctccttgatttgggccgcatagacactctcaggcacttctttgaaacacgcgcccaaacattgacccatatgataatacaaacagggccgcccttgatgtccctgacagcgtcgtaaaggataaacccgttgtaagaatcgcaatgtttcttgggcggcatacacgtccggataagggccaaaataaaagccgccatcttttttgacatcccccgtgatcagtaggcgcggatcgcgttcattcgtaattttaatgtaggggtagcctgtgccccgcttaagtttaatattaaagtaaggttggtgtttctggattaacgtaatttccaacaaaaaggcctctttatttgtcgatgtgatgattgtttcaaaatcgacaatttcagagaccaatttggccgtttttccttcgtgactactcttgaaatacgagcgcacgcggtttttaagattttttgctttacccacatagataatcttggcattgatatccttcatgatataacaaccaggtaatgcgggtaagagtgctaatttatgttcaatgtgttcgcttgccaaaaacaccactcctttaattcaaaacaagtgttcgtctttctattttacgtgtttttggctaaattgcaactattgtgctaggaccttggctaaaaattgttgcgtccgttcttcttgcggatggtcaaaaatggcttcggggtcccctttttcaacaatttgactatctgccatgaaccagacttcatccgccacttcgcgcgcaaaccccatttcgtgggtgacaacaaccattgtcatcccttcttgtgctaagtcttgcattaccttgaggacttcgccgaccatttctggatcgagcgcagatgtcggttcatcaaataacaatacgtcgggtgacatcgctaatgcccgcgcaattgcaatccgttgtttctgcccaccagagagttgatcactataagcatccgccttatccgctaaaccaacgcgttcaagcaacgcttttgctttagccgttgtttcggccgctgattctttcttcactttttgtggcgccaacattaagttatcgaggacagttaaattggggaaaaggttaaagttttggaaaaccatccccatctttgtccgaatctgatcaagctgtttttcagataacgtcatcaaatcggtgccttcaaacagaatttggccactcgttgggtcctctaaacggttcaagcaccgcaataacgtactcttacccccaccggaagggccgatgacaacaatcacttgaccagcttggacttcaccactaacaccatttaacacgaggttgtccccatattttttaaccaattgattaatcttaagcatgttgcatcttcctttccacatagttcaaaagtttcgagagactaaaggtcatgataaagtagatcaccatcgcaacaaaaatcggtgcaacgcctttataagttgctgattgaaccactttgagttgataaattaaatcagtgaccccgataatggaaacgattgaactttccttgattaaagaaatgaattcgttccctaaagcaggccagatattcttcagggcttgtggtaaaacaatgtaacgcattgtatcgcgttgtgacaagcctaaacttcttgaagcttcagtttgcccagcatcgatcgcattgatccctgaacggataatttcagcaacatacgccgcactatttaaggaaacggcaattacccctgccaaaagtgctggaatgttgacccataagccaatcccgaagtagacaaacatgatttgaatcatcaacggtgtgccccgaacaaattcgatatacatgactgccagcgcacgcaccaacttattcttggccaaacgcccaaaggctaggaggaccccaattaaaatcccaattgcaattgaaacaatcgtaatgaataatgtgtagccaatccctttagcgaagtatgcccaatagtgccacatgctagtgttgtgcgtattgaccttcatgagttggcccgcgttctttaagtattgcggaattaatttttgctttttaatttgcccgatactcttattagcagcagcgactaaggttggcgaatcctttggaaaggcaatcgctgatccttgcatgtctgcgcctaaatcaaatttcccattaatctgaacgagttctggatcattacttgcataggcggttgcgactggttcttccgccacaatcccgtcgattttatgactctttaatgcaaggacgagatctgggactttggccaagcccgtaatctgcgcatctttaatttgctttttagcgagtgtttgttggagactccccgtttggacccccatttttttcccgttaaaactatttttggagtggtaaatcttcgcatcagctttattgactaagattgattgaccaccgagataataaacatcagaaaaatcaacactcttgcttcgttcatccgttggtgacatcgccgaaataaccatatcgactttaccggtttccaaaccaaccaataacgcatcaaagtccatcgacttcaccactaacttaacgcctaaatcatcagctagcttctgtgcgacttgaatatccataccgacaatcttgttcttaccgtttttattcactaaaaattcataaggtgcataatcggggctggtccccaaaaccaacgtttttttagcttgcacttggctaaccgtctgtccagctgccaaaacgggctgctgctgaatcatgaaaaacgttaacattaccatgaatggtaacccaacaaaagtgagtaattttttaatcgtcatattatctcctcctctgattaggactatcatacaacaaattaaataattatgcaatatttatttataaaaagtgaatcattggcgaaaccgttattatctggtatgatagatgcaaattagaaaagagggattacgatgggcttaaaagtcactaacaagaccgatttaaccggtttattcgataaattcgcatcactaccagaagaacgccaaaaagttgaagcacaagttgaagaaacagctgataaattaaaaaaggtagatgcagaacaaaaagaaaagcattaaacaaagacagcaaaaaaggcggtaagacaaattcatttttgtcttaccgcctttttgctggtttaaacgtgcgtcatttgcaatcgcctttcggttaacgcgattgtacgctttattctgcgtgtctttctgggtagcgttgttttaattgttcaatgttttcgcgcgcgactttatcaaagtcgaggttattccattccgcaatttgtgataaataccaaagcacatcgccgattttcttagacatcattttttcatctagttcgtggccttggaacgcatattttttaacgatatcaaccacttcaccactttcacttgctaagcccaaagctaagttagttaacacttgttcgttaccatataacgttcggttggctaacttttgatagtcattaaattccattatgcttgtccccctattgcacattgcttttcaatccattcccaaactgtctctttaccagcaccagtcagtgcgctaaagcagacaaattgatcgactggattaaaatcaagcgcttctttgatgattttttcttgacgattccatttccccgttgagatcttatccatcttagtagcaaccactaaaacagggatatcataatacttcgcaaaaacgtacatcgcgatatcatcatcggttggttcgtgacggccgtcaattaatgaaataagcccctttagatttgagcggctggttaaataagcctcgataatttgcccaaacttctcacgttgcttctttgaaactttggcatacccataaccagggacatcgacaaagtaaagttcgttttcaacgcggtaaaagtttaaagtctgtgtcttacctggcttgctagatgtccgggcataactcttacgattgattaatttattaatcaatgaagacttaccgacattcgagcgaccagataacgcaatttcaggtaattgatcagttgggtactgcgaagcagctaccgcactcatcaccatttcaacatcatgtacttccataataacctccgattatttccttcgaatgttagtttagcataaataaataattattgcgccgttgacatctctctagtttcatggttaacatatcttcttaaccccgttaaatcgcgtcattgtaccgtttcaaaagtcccttaatgcaaaaaaactgccgcgacaaaatctaatttgtcccggcagtcttttaatttttatgacgcttcttgtccgtcagctaaaaagagttgtgggttggctgtgccatccaccgcttctttcgttacaacaactttagccacgtcttcacgacttggaatatcaaacatcatatccatcatgacttcttcaatgatcgaacgtaaaccacgggcccccgtgtttcgttcaatcgctagatgtgcaatcgcatggagtgcttctggtgtaaattctaattcaacattatccaaggccatcaacttgctgtattgcttaacgagcgcgttcttaggttcagttaaaatatgcaccaaatcatcttcagtcagtttttccaatgcagcggtaatcggaatccgaccaatgaattcaggaataatcccaaatttcattaaatcttccgttacaatttgttgcattaagctttgatcttcattggtagtttgaccattcttgcttccaaaaccaattgtcttttcacctaagcggtttttaacaatcgtttcgatgccgtcaaaggcgccaccaatgatgaataaaatattggtcgtatcaatttggattaactcttgttgtggatgcttgcgaccgccttgaggtggcacactagcaatcgttccttcaagaatcttcaagagggcttgttggaccccttcaccagagacatcacgcgtgatcgagacgttttcactcttcttggcaatcttgtcgatttcatcgatgtaaatgatcccgcgttcagcacgatcaacatcgaagtctgcattttgcaacagcttcaagaggatattttcaacatcttcacccacgtaacccgcttcagttaaagtcgtggcatctgcaatcgcaaatggcacatttaaaatccgcgctaaggtttgcgcaaggaatgtcttcccggaaccagttggtccaattaacgcaatattactcttttgtaattcagtatcgccttcttcggccactgacatttggttgacccgcttgtaatggttgtagactgcgacagataaagcttttttcgcttctgtttgaccaatcacataatcatttaaaatggctaaaatttcttttggctttggcacttctagtaaatcactgaaggcctcatctttaaactcttcatcaataatctctttgcaaaggtcgatacattcgttacagatataaacaccagggccagccacgatctttttcacttgatcttgcgacttcccacaaaacgaacacgttacgggtccgttagttgtttctgtatcatctagcatactgggattctcccctttctcgatatacgcttaccgctgtgagtcgttaaaatacacccctacaacgtaattcagactatagcataactatggtctagaataaagtaaagttactcgcacaccgtcaatgacacaaaagcgggtccaaagtaaacaccttgaacccgctttttagcatcatttaaagcttggattgatcagacgaccttatttagcgtctttcacttctacagctgaatcagcaatgatttcgattgctttcttaacaccgatatcatgttttaacatgtcatctgataagacgctacgaacagcagcttcttccatattgtattgttcagctaaactcttaagttctgcagcaacttcttcgtctgttgcttcgatgttttcagcttccacaacggcttcaagtacaagacttgtcttaacgcgtttgtcagcatcaccagcgaattgtttcttcaaatcatcttcagttgtaccagtgatttgatagtacatttccgggttgataccttgttgttgcatgttacctaagtattgttgtaattgactgttgatttcttcgtcaatcattgcttgaggtaattcagcgattgttgcattttcagttgctttagcaacggctgtatcttggatagcagcatctgcagcatcatttttttgttgttttaattcttcacgaattttttcttttaattcgtctaatgtatcaacactttcgtcgatatctttagcaaattcgtcatctaattcaggtaattccttagctttcacttcatggattgttaccttgaagatggcttctttaccagctaattcttctgcttggtaatcttcagggaaggttactttaacatcaacgttgtcgtctgctttgtgaccgactaattgatcttcgaaacctggaatgaatgaatttgagccaagttctaatgaatagttgtctgcttgaccaccatcaaaaggtacgccatctacagaaccagcataatcgatgacaacagtatcgcccttttcagcagctgcgtcttcttttaataccaattcagcttgacgttcgcgacggttttcaatttcttgatcaacgtctttgattgtaatgcgacggctttgttttggtacttctaagcctttatagtcgcctaaagttacttctggtttaacggtgacttgagcagtaatcacccaaggttcgcctttttccattttttcaacattaatttgtggttgatcaactggttgaatagcagcttctttaacagcagcatcataagcttctggtaagattgcatttaaagcatcttcataaagggcttcttcaccatacatcttgttaaagatttggcgaggcattttacctttacggaaacctggtgtgttgatatttttacgtacacgtttgaacgcaacgtccaaaccttcactaattttatttaaatcaatttcaaaggttagttcaccatcattggtgccctttttttcccattttgctgacataatttccctccgacagttatattcacaatctatcaattgcatacttaatcagcataaactatttaacctaaattgtaaatatttattggtctaaaaagcgataaaatccgatattttagtcgtttcaggccaacttttatcgaatttaatgcacaaaaaaactcgcagtttttacactacgagtttttcgattcaactaggttgaatattagtcgataatttcactaacgacaccggcaccaacagtacggccaccttcacgaacagtgaacttaagacctttttcaatagcaactggtgagattaattcaacagtaaatgttacgttatcaccaggcataaccatttctacaccttctggtaattcgataacacctgtaacatcagttgtatggaagaagaattgaggacgatagtttgagaagaatggtgtatgacgaccaccttcatccttgctcaagatataaacttcacccttgaagttcttgtgagtttggattgaacctggtttagctaaaacttggccacgttcgatgctatcgcggtcgataccacgtaataaagcaccaacgttatcgccggcttgaccttgatccaatgtcttacggaacatttccaaaccagtaacagttgtcttagcaacttcgtctttcaaaccaacgatttcaacttcgtcaccgacagtaacttggccacgatcgatacgacctgaagcaacagtaccacgaccagtgatcgtaaatacgtcttcaacaggcatcaagaatggtttgtctgtgtcacgttctggagttgggatatactcgtcaacagtagccattaattcttcaacagctttaacgtcgtcagcattgccgttcaatgcaccaagtgctgaaccgcggataactggaatatcgtcaccagggaaatcgtattctgataataattcacgaacttccatttcaactaagtccgttaattcgtcatcatcaactaaatcagtcttgtttaagaagacgatgatgtagtcaacaccaacttggtgagcaagtaagatatgttcacgtgtttgtggcatagggccatcagttgcggcaacaactaagatagcaccgtccatttgagcagcaccagtgatcatgttcttaacgtaatcagcatgtcctggggcgtcaatatgtgcataatgacggttttctgtttcgtattcaacgtgggctgtattgatagtgataccacgttctctttcttctggagcagcatcgatgtttgcatagtcttgagcttcagccaagcctttgtctgccaacatctttgtgattgctgctgttaaagttgttttcccatgatcaacatgtccgatagtaccgatgttaacgtggggttttgttctttcgtaatgtgctttttctgccattaaaacgaacctcctgtattttcgcaagaaaaaatcagtgtttagatttactaaactgataatcctttacataatattataatacttcaagcgctaaaatcaaagtgtttttttacacttgaagaattcaaaaatgattatatctgctatgagcgcgtttgtaaacacttaatgctcaaaaaaagtcagttttgaaacgatatttaggtgttttctactctaaaaatcaagtttccctgtcatttcttgcaactttttcacccagtcctgtatcttttctgaaataaccactgacgcggtataatccggacccagtaactgtttgagccatgcttgcgcccactccgtaggattatacatgatttcagcttcaaaaggatataaatatgcaaatcccatctcaacatccaccatcacttgtgctaacaaagtcggatcttcagtggctaactgctcatttaacgccgctaacaccgcattaaacgtcggactctcctccatcaattggatatcggcaggtacaaaagtttttgtctgttcaaaccattgcatcgtgactaattgttcaatattcagctggacgagcgtttcaatgacagtcgtcttcacgaaagcatgactgtaaggattcgttaaaatgggcgcaatactggtgacataaacattacgtggtaattgttcagcttgcgtcaacattgctagctgttcagctaatgggtgcgcagtgaggttatagaggccctctgcttgcttttgaatcgctgcttggtgattcgcttggtattctaattccgcagccgtaatcattattctaagcgtcttaatgacttgcggggcaatcgtcgcatggcgtaatgcctcccacacttgatttgccgtaataaaacggtggttattcagtaataatgcaagataaaaccgcactaaatctgtttgttgtaagtagtccgcttgttgttcttcgacgattgtcaatgctgtttgcggatcaccagcttcaatcagcgcactggcccacaataaattcgccgacaacgtctgttctagttgatacgcagcttcaaaatggtcgcatgcttgctgccaattttgttgatttaacgctactttccccatccgtatcagccgatcatactgatctggaaattgcgtaatgtcacccattcaatcacttccttttgacaattaataaaacaatagcgcctagaatcaactgacctgatccagacgctattgtttctaaatgttattcagcggctttttcagcctttggtttattatcttttctttgacgacgatgattttgattaatttccataatcactggtagaatcactggccgacgtttcgtttgttcatacaagtaatgacttaagttttcccggacatcttgtttcaaatgactccagtcaaattctttgttgtccagattattttgcaccgcatttttgataatttcggtactctcagccattaaatctttgctagtcttcacgtaaacaaaaccacgtgcggtgactttcggttccgcgataatcttcttattcttgcggtcaatcgtaacaacagcgataaaaatcccgtcttctgataataatttccgatcgcgtaaaacgatattcccgatatcgccgacaccgctaccgtcaatcatgacgtcagttgcgtcaacttgtccgccaacatgcatcttccctttttcgtaagcgacaatatcgcctttaccaacgatgaaaatatctttgtaatccattcctgtttcatgagcaatatcagcgtgtgctgctagttgccggtattcgccttgaacaggcattaagaattttggttgcattaaattcaacattaattgcaagtcattcttattggcatggcctgaagcatgtaaatcatcgccaaccgccttaacttcgccacccgcacgataaatcatatctttggtcttcgctaaaatcgtttccatcgcgtgtgaaggagatgtcgttaaataaaccaagtcgccttcttcgatgtgaattaaacgatgatgactagttgccatcttttgaagcgccttgattggttcgcccatccgacctgtttctaagatcactgtttgttctggtgcaagtgtgcttaaatctttaggttggaccaagatatcgtcatctggcaaaataatcatcgataatttcattgctgtccggacgattttttctaaatcacgacccgttaaaaccactttacggcctgttttataagccgcatcaatgacttgttgaatccgcataatatttgaagccactgaagccacaatgatccgacccgtttgatacttgaacgtttctaagatggattcagcaatatcgcgttcgttagccgttgcaaatggtgattccgcattagcagaatcactcaagagtgctaaaacaccttgtttgccaatttcagctaagcgtgcataatccgtttgatacattggcattgctgattgatcaaacttaaagtccccagtataaacgacttgtccttcatccgtcttaacgacaatccctaatgaacctggaattgtatgcgttgtcttgaagaatgaaacggttgcgcgttcaaaatcgattgctgtattcgcatcgatgacgtggaagttttggaacttacgtaattttggttcactgctaaccgtaattttagctaaagcaatcgttaattcagacccaaagactggtacatcatgttcctttaagaaataaggaagcgctccaatcgcatcagcatgaccatgtgttaggaaaatcccagcaacacggtctgcattttcttctaaataggtcatatcaggaataacgatatcgatccccaataattcagtttctggatatttcaacccacaatctaatacataaatttcgtcgtccacttcaacaatgttcaaattcttaccgttttcacgaacaccgccaagtggcataatcttaatgttactcattctttcacctctagcacttgaggaatttattccccaaactattttgtttgttttagtcgttcattcgtttaaaactcatccgccttaaagtctaactcatattttatcacaatttaaacaaactaacagcttttgattactaaaagccttttgagcacaaaaaaagcgggtccgcataacggacccgctttttgaaaatgaattaacgacgtaagccaaggctcttgattaattcacggtaacgttgaacatcgctttcacgtaggtaacgtaataagttacgacggtgaccgatcttcttcatttgaccaacatatgaatggtgatctttcttgtgaacagataaatgttcgtttaatgagttgatttctgcagtcaatacagcgatttgtacttctgctgaacctgtgtcgccttcgtgacgagcaaattggttaatgatttcgttctttttttcttgtgaaatagccatgctaatttccacccttctggtataatagcctagaacaacgtaaagcgtcgggtgaacgtcgctaaacagagtagtaggcctgtgcaataagcacttttcaagtttactaaatattagcgtcaaaagcaaggcacagtttcaaactatttaagcagtcaagttgaaatactttacaagtttttattgcaatcactctcactattttggtataataacgactgttgaaattaaaaatcttttttataaagatagtgaaacccatcggaggtgaacaacatgccacaaattaaatctgctatgaaacgtgtgaaaacaattgaaaaagctaaccaacgtaacgcttctcaattaagcacaatgcgttcagcaatcaaaaagttcaaagctgctaaaacagcaggcaacgaagaagctgcagacctattgaaagctgctacacgcgcaatcgatatggcctcaacaaaaggcttaatccatgccaacaaagctggccgtgacaagtcacgcttaaacaaaatgatggctaaataatttaaccacaaaaaagcccccacaaccatttggtttgtgggggctttttttgctttaagcaacatcatctgtcgcaaattgtaacataaacagttcaaacaataaggttgcttcaccttgcccagtctttattttttcttcaatgccctctaaacctagataggcttgggcaagcgtcgccttagaaaagtgccgaatttgttgcaatgctaatttgatgcggtatgggtgaatttttaagacgctcgccaaattaccttggctataccctttttcaaaaagaattttcacttggagtaacaagcgaaattggcccaacaagatggcgttaattttcagcggttcttctttttgtagcaataaatcgtgatacatctctaaaaccggaccgacctttttttgtaaaactaacggcaccaattcaaaaacattatcttcaatactacttgccactaatgcactaacggccgtttcagtaatcacccggctttgttgcgcgtaaagcagtaatttgggtaactcagccataatctgactgtaatcaccattagtcttgcttaacaataacgtcattgccgctggttcaatcgtgacttgttcactttgcagttgcgctgtcactaactgctggacctggcgctcattaatcttttgaacgtcaatgacagttgccatcttcttcagttgtttaacaatcttcttgcgttcatccaacttcgcgtatggcgcgaagataacgagtgccgttgtcggttgtggctgttctaaataagcttggaatccttttaaatcatgatcaagtttagttttaactttttcacctgttaagaagaatggattctgcataaaaacaattcgtcgctcaccgaaaaagggggccgattccgcatcttctaatgcccgcgccacctccgtctggacgagatcataactcgcaaagttcatcgtcatttcttctgtcgaaagcgttgctttaaataacgctctaacctcttcaatcagcgctgactcttgtcctaatacgagatacaccggtgcaaacgttcctcgattcagtgctgtttttagttgttctgtcttcatttagtcacaatcctttagtgttgttttaatcattggcacttggccaaaaccatagcgccattccagcatcccacagtcagccgtattccaaaatgggacgttcgcacgttttaaagtctgcaacgttgcggcatgtggatgaccataacgattatggcgtcccgcagaaatcaacgccccttttacctgccacgtcgcaattgactggggatcactcgccgtttgactgccatggtgacccacctttaggtaatcaacgcgtaattgtgggtagcgatcaacgattgccacttcacccgctttttctaaatcaccagtaaataaccaactcgcaccaccaatttgcgtttgcaaaacgagtgagtcagcattcccgcctggtccggccaccactggcgctaacacattgatttgttggtgaccaatcataaaatgttggtccgccaaataaggctcaattgcaacttttgtaagatgcggccgcacttgccgttgaaactgccggttttgcggtaagcccgcagcacaaatcaaccgtttaactcggatatgttgcataatttcatttaagtcccctatatgatcagcatcctgatgcgataatgcgattgcctctaaatgatcaatgccacagctgtagaggtaattaactgttactttttccgcccgactcacaatttgccgccgttgccacttttcttgcggtaaagctagtcggccgccggtgtcaattaacaggttatgtcgattgaagggttgttgaatcaacaggctatcgccttgcccgatatcaaacataatcacgcggccaaccggattaaagtggataccaataaaactaatgacatacaggctgataacagccccccagccccactttgctcgccgaccagtacttgccatcaaccatagtgtgcctatcacaattaaaaagagtggtattagctggattttaccgaaagtaattgtcgcatatgggaacgttgcaatccaagctaatcctttatacagcgtcgttagcaggccttcttctaaccaaactatcatatgactaacaggccataagcaaatcgctaccataatcaaacccaacatgactggtaagaaaatcggcgcgacaatcccattaatcaaaatcgtcaagatatgccaacgataattaaaccgcaagcacaccggtaaacttaacaagcctagccaaaatgccgttgtaaaagtaccatggcgccgctgataaatcaatccaaaagccatcagatagctcagcaatccccccatactgattaataaatacggctgccataaaagattgaccagcaatacccaactccaactatctaaacgcgattgctgaaaatgacttacttcgcagattaatcgtagtaagatcagcccgatagcgcgtgtaatactcgtgcctccccccacaaacaacgcataaaggggtagcaaacaaaacaagctaacattcacccattcacgcgggactcgacacagcgttgccaatcgacgaatgattgtcacaaagtagaatacatgcaatccggataaactcaataaatgaataatccccaattgacctaacacattctggtaggccaggccatctgactctcgaacaccacataacaacgcctctgcatgaaaactcaacgctggtggcaattgtcggagataaatcagcccctgttggcgccgttggtggaaccaatctagccaaccttgtggtggaatgcgtctaaagaccgttccgtcaattatatttgcttgataaaaacaatgcttttgctgccccataaagcgcgcatagtcgaactcattccggttagtagcaccttggatacgctctaattcaatatcacccgctaataataacggctgattcgtcgtttgccaacggcgtttttccgctgaactctggcagcgatagtagcaaacaacacgttggtcatcattctgcccctgcgccattaattgaatctgatcgccagccactttgatcgtatcgggttgaatcttatatacttgattatttggtctaaccggctgttcgtaggtgcgccgtgccagccaaaaatggcaaccgcctaaacacagtaccagtccactgaccattaacacagctggttggcgtaagcaccacagtcgcagtagacacactatcaaaagacagctaaaaaaaagtggtgcttgtcctagtaataacgcatttaaacttgctaaacaaataactggataaacccagttattcttaatcactcagcagtttgttcattctccaaaaagttaacgagggtgttggcgtcattcgccgttaaatcgacttggtccaattcaatactagatttttcaatcaattcatacgcatattcgtcgttatgataatccttttgataatggattttactgatcccagcttgaataattaatttagtacactgaagacatggaaaatgtgtgacataaatttcggccccttccgtctgcacaccaaacttagcgcattgagtcaaggcgttcatctcggcatgaattgttcgtaaacaatgcccgtcccgtaataaacagccaacatcgatacagtgactttcatgtgccaccgaaccgttgtagcctcccgcaataattcgccgattacgaaccaccaacgcacccacaaacaatcttggacaggtgctacgcatcgacaacaagaccgattgaagcataaaatattgattccacggcattctcttttctgacacacgaattccccctttaaagttaatagttttagtatagcaaaaaaataccattcacaaactaattaacacaaatttgtggccgtaattgttcaaacgttttcggcccaattcccccaactttttgaagatcttcgatttgtttaaactgcccttgctcatcccgatatgcaattatttgttcagcttttttaggaccgatgccatttagcgtttgcaattgtgtcgcatccgcttggtttaggttgattttagcatcagttgatatcggactggctcccgcttgattgtcagtcgcagcctgtggctcgtctgccgctttcactaattcttcggcttgcaccgcttctcccttagttggcacatagataataagttggtcactcaatgtttgcgctaagttcaactgactcgtatccgctgcttcggtcacatcccccgcttgtttcagcacctcaaataaacgcgtctttgcaacacaaatcggataaatccctggatgtgccacagcgcctttgatatcgacaaacccaccttttgagacgcttttcttctgtttgacgggttttgccttcacttttcgcttagttgattgcgccatcaattgttgattggttgatagaaaacgttgttgccgactatgctgccaaaacacaccaccactaagtaaaattatcaccaaacaaggtacccaccagaatcgacgataccgttgccaatagtcgcgccacatttttcgccacctccttattcctaattaccccaaaacgcaaaaaaaatttgccgattctttcgaaccgacaaattttttaatgtttggctaaataatccaatgcgtcgtccaagtttttgacaggaacgattttcatcttagtaccaatttttttagcggctgctttggcaatcgcataattattttgataatggggttctacctttagtatggcttttgtcacgggatcatcaggtgcgaaaaagactttggcgccttcttgactcgcaatcagtaccttcttatcaattccgccgattggtcccactgtcccatcaggatccattgtccccgttccagaaatcttgcgaccacccgttaagttttgtttcgttaattggttataaatctgtaacgtaaacatcaagccagcagaaggaccaccaatttcacccgcatcaatcttaaccggcacttttgtcacaatttttgagtgatctgtcagcgtaattcccaaaccagcgtagcgcgatttaggtaatttaatcaatttacgggtcgcagtcttacgctggccattatgttcatagctaatcgtgactttttgattcactttaagcccttgaacatacttgacgaacttatttgcactcttaaattgatgctgatcaattgccgtaattgtgtcaccaatagccagatcttttttaaaagctgaattatctaaaattgacatcacatagacacccagatattgagtgtggtattcctgatgtgccttttgataagccgcctcaatcgcaaaattaatcgagctttccatgtagtatttttgaatctgatcatacgcttcagtatcatcgtcacccattagttcatcacgactaataatctccgtaaaaggttgtgttttagacagtaatagctgtaaccccgtcactggtccttgaatcccgacggttgttaacataaagtggcccttatgttgatctcgttgaccgttaactttaacaaactggttggtattttcggccgaaccgaccccttcgacgtaataatgcgttggggtaaagcaaaaagcaaacacgacgatcaagccaacaatccataggagatgcttcaatagacgtttattcttattcatattaatcactttcaggtcctaatttttgtgcaagcgcagacgcgacaaccggcggcaccaattgttcaacctggccaccaaacgttgcaatttccttcaccatacttgatgagataaaagcaaattcttgctttgctaataataacaccgtttctaaatcagcatcttgtgtctgattcaacgccgcaatatcacgttcatgctcaaaatcattggcattccgaataccacgaatcaaatatcgcgcaccgacttctttagcaaaggttgccgtcaacgtcttcgattgtgcgattaccttaacgttatccaagtgttgcgtcgccgcttcaatcagttcaaccttagtagttgcgtcaaataacggttgtttagcagcgttagtcattaccgcgataatcacttggtcaaacaagtgacttgcccgttcaacagtatcgagatgcccatttgtaaacgggtcaaaacttcccggaaataatgcaattttcggcatatagctgcctcctaaccaataaatttaaagattgctacttctgtaatcccataattctgttgccgtttcagtatgtaatgcggaatgtcagttggataatcaaccgtcgtatcggtttcgcaaagaatcgtcgcgtctggtgctaataaccccatttcgacgaattgttgtaactgaagcaacatctgttgttccttgtagggtggatctaataaaattaaatcgaattgaacaccagcatccgctagtttcaccaacgctttttcagctggcatcttccagattgtaaagcattctggcattttagtaaccgcaacgttttcttcaatcgtttgaatcgctgcatattggcgatcaactaaataagcatgatccataccgcgtgaaacggcttcaattgcgagaccaccgctaccggcatataaatcaagcgcctgcccaccgtcaaaaaattgccccaacatactaaacattgcttctttaaccttgtccgttgttggccgtgttttcatcccagggacagcttttaacttgcgacccccaaattctcctgcaataatccgcatctctattactcctctaattctgccgcatcggcaatttcttgatctgagcgtcctactcgattactgaaatccatatcaatagctggtctttcagaaggggtcactcgtttgacgtagtgtaatttttttaaccgttgcataacagtttcggcatctgccatatctacgtatagataaacatatttcattcgtttcgaggtgtaatacacaagtccgtaacggcgtaattgctttacttgtcgtaatgaatagagccagacgacaattccttggcgttgtgtgatttccaatgtcatttaatcagtccttttacatttagtcaaaaatcatcattgtttgttcatcggtacacagaagcgttaagtgctgatagcttggattattaatcgtaagttgcaacgctagattctgttgttgcgcaagcaccagcccttgggaattgagcccttgtggccaataaaaaagttgctcgcgctgcggaaaacccgctgctcttaacggagcctgtttaaagtcggttgctgttaaaaaggcgtccgtctcttgtgtcgcttgtttgcgcacttggtgcagcttttgcagtccctttttagtcaaccactgcgttggtgtacttgttaattcactcaccaaattctgtgtattttgcaatggtagttgatttatcgtgagcgcaggttggtcattattttggcgtaatgtctgcaacgtttgcaccaaagcgagttgtcgttgactatctgtttgcggttgttgcgactttgctagctcatccactgggactggtgtttttgaaacaactcgatataaatcagtttgtagcagtcggttcgcatttaaatacatcacagctgtcaatcgttcttgctgcatcactaaagttgcaaacgtctggtttttaaacatcactaacggcgtttgttggtgttgctccggcgttaaccgcaacttaaattgttgctcgtgtaacgtcactaagagcgaagttggtaacgccgtcttcttagttaatgtagcccgcttttgaaaaaaatgaaacggcgccacatcgttgtccgcaccaacaaccatgatttgttgtgtttgattggattggttatcaatcagcgcttcgacatactgtcggctatctaagtgaaataaccaccgtcgttgattttcatcagtcagctgttgctcgaccggttgcccataggttgcaattaattgttcagctggttgattaatcagtttcgccggcccttgtgttttcgtcagtggcgtttgttttattgaccgttcagtcgacggggcttgtgcaaccttaggctgattaaccgctggtgtttggataatcggccaaccataaaggatgaccaaccagacaatcaatgcaacgattaatcggcgtgccccttttatcatgctttcacctcactaattcgctgccgcagcttttttctcttgtgcgctgatgttcaacacgattcccagtgcaatcgctagaaccatcatacttgatcccccataactgatgaacggtaacgtcaccccagtaatcggtaagattcctagcaacccaccaacattgaatagggtttgcacgaaaatgatagtgccaattccgtaacataataaagtgtgatacatcttagtcgcatgaatccctaggtaaaaaatccgtgctagtagcgcaaatagtaacgcgataatcacgagggtcccaatcacacctaattcttcagtggtaatcgataaaataaaatcggtatacggttctggtaagtaaccgcgcttttggatactattgccaagccccaagccaaaccaaccaccattattaatcgcatagtaggaattcactaactgactcccacccatattttccaattcaaatggatgtaaaaacgataaaatccggttgaacttataagaattaacgttcgttgaaaagttaaagtgccgtaaaatactaaataaaatcataaccgttgttgtgaccgctgtaatcagcgaaaaaccataccaatatgacataccggtgccaaaaaacatgactaccatcacagcagccaagatactagcgccccctaaatcaggttgaataaacaccagtaggatgattccagcgactaatacaaccggactaaagaataattttaaattatcaacaaatccgtcggccagttcattttccttacgcgagagcatattagcaaggtaaataacaatcaataacttcgcaaattctgacggttgaatggtcagtggtcccaattgaatccacgcggtagccccattaatcgctgcgcttggtctgaaacgacttaacagcaataaataaatgagcgccaagaaaaccacaatcgtcattgcttttagaaaagtgcgattttttaaaacggataacttaagaaaatatgtgatcatcatcaagataaagcctaatgcgataaacactaattgcttggtaaaatacgcatctggtttcattccgcgaattgacattaaatccgaactcgccgaatagaccattaaagcaccaaatgcacataagataacatatggtagcaataaccaatagtctaaatactgaattttacttttttgaaactttttccacacagttacacctaatttctatttcgttcgtattcagcctgtccttgcccaacttgcatgccaatttgattgacccgttcttctaactcacgcatcaaagttgcaccctgtggcgcactaataagttgcatccgttttgcaaaatcaacctcgcgcgagaaaccaaataattgggtatcaattacctcttcaataattggacattgactcatacaaagcgcatcaatttgagcacgcaatagttgctcaatgcgtagcgcatccgcttctaaagtgagataagctgttgttttttgttcaatcataatttacgcctacctattcgttattaaaaagcatactctgttcgttattataccatatttatgcacaaaaaaaggtagccaagcggctacctctaatggtttttaatgattaaccttttttacgtttcttatcagctttttgacgcatacttgtgtcaagaatcttcttacgtaaacgaacagaagtaggtgttacttcacagtattcgtcatcgtttaagaattcaattgattcttcaagtgacatttctttaggtgtcttgatggcagctgagtgatctttaccagaagcacgtgtattcgttaagtttttacccttagtaacgtttacggcgatatctgtatcacggctgttttgaccaacaatcatgccttcataaacatcaacgccagcgccgatgaataattggccacgatcttcaactgattgtaaactataagttgttgatgaacccgcattgattgaaactaatgcaccgttacgacggcctggttcccagttcttaatcactggcatgtatttttcgaaggtatggttcataattccgtatccaccagtcatcgttaagaattctgttgaataaccgattaaaccacgtgaaggtgctaagaaagtcatccgtgtttggttattagcatcactttccatgttttgcatttcacccttacgttgggccattgagtcgattactgagcctgtatattggtcaggtgtgtcgatttgaaccatttcgaaaggttcgcatgtaacgccatcaatatcgcgatagataacttctggacgtgacaattgtaattcgaaaccttcacgacgcatttcttcaactaagattgaaagatgcaattccccacgacctgaaacaatccaagcgccggctttgtcggtatcttcaacacgaagtgaaacgtcagtgtgtaattggtgacgtaaacgttcttcgatcttacgaccagtaacgaaatcaccttcacggccaacaaatggtgaatcattagcagcaaatgtcatttgtaaggttggttcatcaatccgtaagattggtaaagcctcttgatggtcaactggtgtaacagtttccccaacatagatatcttccatcccagaaacagcgattaaatcgcccgctttggcttcttggatttcaacacggtctaaaccgatgaaaccaaaaatcttagttacgcggaagttcttagcagaaccgtcaagtttaagaacagaaacttgatcaccgatcttgattgtcccacgagaaacgcggccaatcccaatacggccaacatagtcgttataatctaacattgccacttggaattgaagtggttcgtcactattatcaactggtgctgggattgtatctaagattgtgtcaaagatagggttcattgtatgggcttgtgtatctaaatctgattcaagacttgatgtcccgttgatggcacttgcgtacacaactgggaattcaagttgatcttcatcagcaccaagttcgatgaataattcaagcacttcatcaacgacttcttcaggacgagcgcctgggcggtcaattttgttaatcacaacgattggtgttaaatgttgatctaaagccttcttcaaaacaaaacgtgtttgtggcattgtgccttcaaaagcatcaacgactaataacacaccatcaaccatcttcatgatccgttccacttcaccaccgaaatcggcatgtcctggtgtatctaagatgttgatttgtttgccgttatatttaacagcagtattctttgaaagaattgtgatcccacgttctttttcgatatcatttgtatccattgcacggtcagaaatttctgcgtgaccatccaatgtatctgattgttttaacatttcgttaactaaagttgttttaccgtggtcaacgtgggcgataattgcgatattgcgaatgtcttctctttttttcaagtgtttcagcttcctctcgctagtgacttgactagtgttgtttgtctcatgtatacaagctattattttaccataaaaaaatgggctgtgcttcatatattagcgtttttttgaaaatacgcaagtttttttcatgaaaatttaattatctttaatcatttgaaccattcataatcgtgacaatttcttgtgttgcttgctttggcgcgataatcatcccttcttttcgcatcatggaaattggttgaccatcaaattgtaaaacttgaaaacctaacgtctcagctaaaacccgacctgcagcaatgtcccatggcgctaatttggagatgtaagcttgcacttgccccttcaacaaatgggcgaaagtgataccggcgctaccgtaaatccgcacacccgaacattgatacaacacctcttgcaagtgtgcttcattggtgaccagcatccgtgtattgacacagattaacccttcttgcaacggctcgtcgacagcatttttgagggcagcttcgttttcgaatattcccaactgtggaccgccccagaacaattgatcggccatcacatcataaataatcccgaatagcggctgaccgtcttcataaacgccgatcataatggcgaaatttgcccgttgcttcacgaaattcatcgtgccatcaatgggatcaataaaaaaagttagtccctgttgccaatcatcaggcacctcaccggcaccttcttcccccactaattgcgcgttcggataagccgtcttaatcttttcagctaagaaagcttgattagcacaatcgacattagtcactaaatcattaggcccagacttagtactaaccgttaatggttgtttaatttgtgtgcgggtataggcagctgcttcaaggatccacttttgcagcgaacgacttaaccgatacaatgcttcttgttccattttttcatccactttcactaattaagcgtcattttgatttgggttcgactactcctctttgcagcctgcatacaccgatatattgaatagcctgacgcttctgaaaaggccttatcaatttttttttcttgcatcttactttgaacaaccactttgaagtcacgataagcagcttgtaaatccgcaactttcgcaccaaattcataagcttgttcaacaagattatataatttcatgacttggacaacttcagctggcgtccagtctggttctaaaggataactatagttcgtttgcataaaggctcctaaaatttgcataaatttgcgccagtttcaattcaactgatgccattaatctctcatattataacgcacttttttagaagctgtcgaatccttttagaaatagcggaatcaaaaaacgacgcactcaactggtgcgtcgtcattctaaactatttattaaatatgaattggcaatcctaatgctaattcggcatcatccataatcgcttcacttaacgttggatgtggatgaatggttagagcaaggtcttctgcattcatgcctgattcaagggctaacgtcaattcagaaattaaatcactcgcgccaacgccagcaacttgagcgcccagaactgtgttatcatccgtattcgtcactaaccgcacgaaaccttctgtatctgctaatgataaagcacggccattagctgcaaatgggaacttaaatcctttagcgttcattccttttgccttggcttctgcaaccgttaaaccggtcgttgccaactcaggatctgtataacaaacagctggcattgcgtggtaatcaaccgttaatttcttaccggcaatggcttctgcagccactttagcttcataacttgctttatgcgccaaagctgctccagcaacgatatcgccaatcgcatagatgcccttaacgttagtttggccttgttgatcaacttcaatcaaaccacgatcagccatcttaataccggcttgttcgagtcccatttcgtcggtatttggccgccgaccaacagtcaccatcacgtaatcggcaacaagttgttcttctttgccgccgacttcatatttaaccgtcacattttgatcagtttcaacagcttcttttgccattgcgccagtaatcacatcgacccctttagctttgaagttctttgtcaccaattgcaccatatctttttcgaagttaggtaaaatcgagtctgtcccttcgagaatcgtcacatgtgcacctaagttggcataggcccctgctaattcagagccgatatagccaccaccaatgaccactaattcttttggtacttccgttaagcttaaaccaccagttgaatcaataacccgtttattaaatttgaagcctttaatttcaattggacgactaccagtagcaatgattaaatttttaaaactgtacgtttgtgcactctcttctttaatcacgcgtaagctatgttcgtccactaaaaaggctgaaccgtctaacacatcaatcttgtgttttttgaacaacattgaaatgccaccagttagtttttcaacaacctcatgttgtttccagtcttgcgttttcgcaaaatccaatgttgctccagtagtcgtcacaccaaagacagatgaatctttcgcctcttgtagtcgatgaccagctgaaatcaaagccttggaaggaatacagccgacgtttaaacaaacaccgccaattgtttcacgttcaatcacagttactttttgacccatttcggccgcgcgaattgccgcaacatagcccccaggacctgaaccgatgactactgtgtctaattcaattgcaaaatcacctacaaccattttaaaatcatccttccatcaataatagctctggatcagctaataattcttttaattcgttcatcgcacgttgcgcagttccaccatcaattaaacgatgatcaaatgatagtgataatttcaagactttgccaacagccaactcaccatcagcgttgacgattggttctgtcccaattcggccaacccctaagattgcaacttcagggtagttaacaaccggtgtaaaccaaccgccaccaattgatccgatattactgattgtcattgaaccaccactcatttcagctggtttcaatttgttatccaatgctttttgcgtattttcgccaatttctttagcgatggcaaaaatactcttgctgtcggcatccttgatatttgggacatagagcccgtgatcagtatccgttgcaattccgacattaatgtagtgtttataaacaatttcgttagttgcatcatcaattgacgcgttcaaagttgggaagtcacgtaagaccgttaccaaagctttaacgatgtatggtaagaaggttaacttaatgtccttcttagccgctacatccttgaatttcttacgatgggtcatcaatttagaaacttccacttcatcgaataaagtaacgtgtggtgccgtatgcttgcttgtcaccattgctttagcaattgctttacgcgttggtgacattttttcacgtgtttcccgttctggtgtaacagaggtgtatggtgtcgcagcaactggttgtgcaactggtgttgctggcgacgttggttgttctgctgtctctacagcaggtgctgtcgttgttgcagcgccattttgcatgaagatttgcacgtcttctttagtaatccgaccatgtttaccggtggctggcacttgactgatatcaacatcgttttcacgtgcgaattttcgaacagatggcatagctaaaatcgtccgattttggtcactaatcgcaactactgcttgactgcttggcgccgttgttttagctggtgttgattctgacgccgtagctggtgcttgttcagcagatgttgccgttgccgaattgtgacctggagcatcaatttcgaccaatacttgaccgacagtcgccacttcgccttcaccgactaaaattttaacgactttcccactaacaggtgatgggatttcttcaactgatttatcattttgaacttctaataaagtgtcatcttcttgaatggtatcgccttctgcgaccgcccatttttgaatttcaccttcggcaatcccttcaccaatatctggtaatttaaattggtaaacaccacctgcatcggttgcagtcggtgctgcttcgggtgtagcagctggtgttgccgtacttggtgtatcgttaccttcaacacctggtgcgtcaatttcaaccagtacttggccaactgttgccacttcaccctcaccgactaaaattttaacgactttcccactaacgggtgatgggatttcttcaactgatttatcattttgaacttcaagtaagacatcatcttcttgaatcgtgtcaccttctgcgactgcccatttttgaatttcgccttctgcgatcccttcaccaatatccggtaatttaaattgatatgccatacgtctaacgtcccttctttcgttatcgactaaaagttaataacttctttaaccttattttcaatatcagttgcatttggtaaccaagttgcttcagcttgtccaaatgggaatggcgtatcaggagctgaaacacgtgcaattggagcttccaatgaaagaacagcacgttctgaaatttcagaagcaacttgtgccccaacgcctgcttgtttttgtgcttcttgaacaataacgacccgccctgttttttcgacagaggcgataattgttgcaacatctaatggtgcaattgttcgtaaatcaattacttcagctttaatattctctttagctaggttttcggccgctttaatcgcttctctcaccattgcaccgtaagtgatgattgaaacatctgtcccttcagtaaccacagctgctttatcaagcggcactgtataagattcatcaggtacttcttcgcggaacgaccggtataatttcatgtgttcaagatacaaaacaggatcgtttgaacgaatcgcagaaatcaataagcctttggcatcatatggattacttggcacaaccacgcgaatccctggaatttgcgtgatcattccttcaaagttatctgaatgtaattctggggtatgcacgccaccaccaaatggtgcacgaatcgtgattggcatgttgcgtgtgccacccatccgataacgtgtccgtgacatctggccagcaatcgaatccattgtttcgaaaacgaaaccaaagaattgaatttcaggtacagggcggaagccttctagtgctaaaccgattgataaaccaccaatcccagattcagctaacggtgtatcaaaaacgcggtcttcaccatgtttagcttgcaacccttcagttgctcggaaaaccccaccgttcttcccaacatcttccccgaaaatcaagacgttcttatcatctgcaagttctaaatccagcgcatttgtaattgcttgaatcatcgttttttgtgccatcttaattcgactcctttgcactgtactctgcgatttgttctttaatgttttgtggttggtcttcaaatgtaacattcaagaaatctgtgactttttgttttggcgcagcatccgcttcgttgatggctgctttaatgtctgttttaacttgttcgatcaattggtcttcttgatcttgtgaccaaagtcccttatcagttaagaaacgacgcattctaacgagtggatcacgtttcaaccaaatatcgtctgtttctttggtccgataacgagtcggatcatcccctgataatgtatgtggtccataacgataggttaatgtttcaattaagaccggtccgttgccagcagttgtaaattcacgcgcttctttcatcacttcataaactgctagtggatccatcccatcgacttgaatggcagaaatcccagctgcgacccctttttgagccaacgttacagcagctgtttgtttttcacgtgggaccgaaatcgcaaagccgttattttgaacaacgaaaatggctggtgctttaaaagcacccgcaaagttcaagccttcatagaaatccccctgtgaagtcccaccgtcaccggtataaacgtaaacagcattttctgattggcgcttcttcatcccaaccgcaacacccattgcttgaatgtattgcgcgccgataatgatttgtggtggcatcgccttcaaagattctggatacttgttaccgtcaatatggcctcgtgaccataggaatgcttgtgataaaggtagcccatgttgcactaattgtggcacatcccggtaaccagggaataaaaagtcgtctttagtcatcgcaaagttacttgctaattggctggcttcttgcccagcagttggtgcataaaatcctaaccggccttgacggttcaaagcagttgctcgttgatcaagcacacgcgaccaaaccatttgtttcatcagttcaaccaattggtcatcactgagatccggcatcaattccggattaacaacctggccagtctcatctaaaatttgaacggtcttaaaatcttggctctcatcgctcaataacttctcaaaattaactgcagctttattattgaccatagtatccatatctcctctttaaaaaactgttttaatgactgcttatatctgtattacttaagcatctttacaagactaatttagcatttcacatcactaaatgcaagcgttttataagctatattagtcagtttacgctttcattagtttttattacatgtgaatctaatcactagttagctaattttcacgtctgttctatatctgttataatttaatttcgttttctgttatataatagcaaataataggcacaaaaaaagagtccgccgtagcagactcatcgttaaatttaagttggggtagttctatgccaagaccggttggggtatctcagcgttgccagcatgcactaagagctcttgaaacactctgactactggtttaatttgttgactgacttgcacgcaccgttcacttacccgcaaatcatttaaatcaatcgcaaccttaatttgaccaaggttgactaacttaatcattgttagcaggattgccccgacaaccaacgttgccaagcccatgaaagcgaattgattaaccattaatactgcacaaaacgaaaccaatgcagctaccgccatcataaaagtgcttcccactctaactttaggtgtttgtgctttagcaccaaccgttgcatctagcacaacgccgtgcaccatttcagtcactgcttcgcccgcttcaataacgttaacatctttgttaactgttgcgattgtaacgggtgtcttttcgctagcagccaataccaaaatatcaccgggcacaatttgatctgcaccgattaagcgtaaaaagccatcacgcataacgctaacccgtgcttgtgaattttctaatactgtttctcttttagcagcttcgacagttgttaagccacttggccgagttgccaataaacgcattaacatcccactgcttgtaatgccagtgatgttaacgtctttttttaatttcttgtgcatcgcgttcgacactccttcccttttgaggaagtcgtcgtaaaccgctagcctaatgctggcagtaaaatgacagaccacctcgaatgatcaccatcgctactacttacaggtccttcagctgttttcatcattttactcaccagactttctctactttaaatttagtcataccgctttatccgacaaaaaaagacgcacaacaattgagcgtcatccatttatcatggcgttcccaatcgttcagttttagcactatatgacgtagaaaccatgttcagctacgttagaaaaagccttcattggcagtttcagttgactcaattggcatctctcgatgtttctgagtagcagcgtttgttcatataggagcctcacctaacggaaaagcaatatatctatactcttatactacccgtttcacttcagcaggtcaagcaattcattccgttttaacttgaattgtgctagaataatgaatgacgaattaatcggaggtcttaactgtgatattaatgaaagatattatccgcgagggtaacccaacacttagaaagatagctgaacctgttacttttccgctatcagatgaagatcggcaacttgctgctgacatgatggcatttttagaaaatagccaagatcctgaacttgctgaaaagtaccacttgcgcgctggcgtcggtttagctgcaccccaagtagatgtttcaaaacaaatgtctgctgtcttggtccctggaccagacgaacccatcttcaaagatgtgattatcaatcctaaaattatcagccactctgttcaaaacgcagcacttgctgaaggtgaaggttgcttatcagttgaccgcgaagtgcccggctttgtgccccgccctgaccgtattacactacgttaccaagatttagatggtgaaagccacaagattcgcttaaaaaactacccagctattgtgtgccaacacgaaatcgatcatctaaatggcatcttgttcttcgatcacatcaacaagcaagacccattcgcagcaccagatgacatgattattattgaatagaagtgcgattggttgtgcttagcaactgagcattaatacagaattggcagttatcccgaattgtgggataactgccaattttagattaaacgggagttgttgcacccaagcgcacgttaaagaagaagtgctgattcgagttggtcaggctttgaggcttaacggtaaaggctactcgagaagcacataaaaaagcgtgattgaaatctcattagaagattccgatcatgctttttttatgcttccgccgcttcaggcgtatcggcaaattgactgttatataaattagcgtacacaccgccggcagctaatagcgaatcgtgcgtcccttgttcaacaatttgaccatggtccatcactaaaatcaaatccgcgtcgcgaatcgttgagagtcgatgggcaatgacgaaactcgttcgcccttgcatgactttttccatggctttttgcaataaaccttccaatcgggtatccaccgaactagttgcttcgtccaagattaaaatcttaggatccgcaatcacggctcgggcaatcgtcaatagttgtttttgcccaagcgaaacgttgcttgcttcttcatcaatcgtcatttgatagccgtttggcagcgtatggataaaatgatcgacattagcggttttagccgcatcaacgacttcatactctgtcgcatcgagtttcccgaaacggatattatcggtgattgaagcatgatataaccaagcatcttgaagtaccatcccaaattgggaacggacttgttgcttgcttaattgcttcgtgtcaaccccatcaatccgaatcgttccagatgtcacatcataaaaacgcatcaacaggttaatcatcgttgtcttcccagcaccggttggcccgacaatcgccactttatcacctgggttagcagtaaagctcaaatggcgaatcaatggtttgtctgggttatagctgaaactgacatcatcaaattcaactttaccttgaacgattgctggcaacgatgctgtttcattatcggttgcttcaactggctcatctaagatttcaaatacacgaccagttgcagcagcagctgattgaatcacaccagacaactgtgtaatctgtgagattggttggttcacttgccaaatatattgaatgaaggcttgtaaattaccaactgaaatcacaccgtgcaagacataataaccacctaacgttgccatcccggcatacgtcatgtttgtcgttaaaccaactaacggcatcatcaagccagaaacaaaggctgccttaaagccatagtcagttaaccgatccgtaatttctgcaaaagcagcaattgcgcgttcttcttgtccgtaaagtttcaagacactgaagccgccataattttcctgtacaaagccgttcatttcgcccaacgtgtcttgttgtcctctaaagtacggctgcgatttctgaatgacccgtcttgaaatcaataacgatgctggaatcattattaatgataagagcgccatccaaatattaatcgtaatcatcatgatcacggccgtgatgatccctaagatcgatgtcacaacttgaattaaactctgttgtaaagcgttcgtaatcgcgtccacatcgttggttacccgtgacaagatattcccttgttgttgtgaatcaaaaaaacgaacgggtagcgcattgatttgcaaatcaatgtcgcgccgtaaatcacgcatcgcccgttgaacagcccgcgtcatccaaaacgagcctaaaaacatcgtcacttgatatagcaacgcaaagctcaaaatcatcgcaatcaccttcgcgatataactaaaattaatcgcaacgtgttgtgctaaactccgactgatttcagtaatggctagtcccatgatcactggccacagtgcattagcgagcaccgaaataacagttgcggtaatcgcaagccaaaatgtcacttgatacggcccaatgtagcgcattagccgtttaagttctctaatattcttcattgagttcctcctgtgataactgtgatgccgcaatcgcacgataaatctcgttatcttttaataagtcgcggtgagtcccaataccaaccacttgaccttcgtttaagacgacaatccgatcagcattcatgatagtcccaactcgttgtgccacaatcagcactgttgcctctttggtgattgacttcaatgcacctcgtaacgccgcatccgttttataatccaatgctgaaaaactatcatcaaagatataaagcgcggggcggcggacaatcgctctggcaatcgccaaacgttgcttttgaccaccagataaattgctcccaccttcggctaaataagtttgtaagccgtctggtttttcagcgacaaaggtatctgattgtgcaattttcaaagctgtccataattcttcatcagtcgcattcggattaccataacgcaagttttccgcgattgttccggtaaataacaccgctttttgtggaataaaaccgatcttttggcgcaacgccttaagttgatagtcgcgcacatcatgaccgtcaagcttaatcgatccacgtgttacgtcaaaaaagcgtggaatcaattgaatcaacgttgacttaccactcccggtactcccaataaaggcaaccgtttcacccggatgcgcttggaacgtgacatcccgaacgactggactttcagtcggacctggataagcaaaggagacattatcaaacaccaattcaccttgtgtgtcggttgttgttaccccgtcttctttttcggtaatattaattggcgcattcagaattttttcaattcgttctgctgaaacagcggcccgtggatacatcatgaagacactggcaaataacataaatgaaaacagtacgtggaaaatatattcaataaacgcaatcaacgtcccaaccgctaagtgaccaccatcaatctgaacagccccttgccaaatgattagaacgaatacgatattaaagatgaacgaaaagcccggttgtgctaaagccaccaacgtaaacagccggatagaactatgactgtagtcatcattcacttttctaaagcgtaatttctggaattgttcccgcacaaaagcacggacaacacgaatcccagtcaagttctcacgcagattcagattaatcgcatccagatttttttgttgttccgtcgacatcggttcagaaacgcgaccaatcaagacaacccccgctagcaggattggaattgccgcaaatacaatccatgagagcgattgacttgtccgtacaatcatgaaagcactcgcgacgatcatcatcggggtcataaaccctgtccgcaacacttgggtcataaattgcatcacctggaaagcatcattagtggtccgagtaatcaaagaagacacaccaaattcgccatactcactatgggaaaactgcatggtttgtttaaaaatatcgttacgaatgtcacggacgatattggtggttaatttgctaccagtataagccaagccaattaagccaattagtccgattaaacagattccaaccatcaacaacccaaattgccacacagaaccaaaggtatgttgattaattcctttatcaataatttgtcctaataacgttggtaaccccaattcgattagaataaatccaaatacgcaaataaagttccaaaatagtaatttcttatatcggatcgtatagcgccacattaatttcatcggtgcaaactccttctaaacttcaaatttaatcttctacctgtgccatatctttaacatactcgattgtttcgcgattgacaataaaagcaacgtcaaaatgcaattgttcttccaaaaaccacacatcagtgactagcaaagccggataacgcggactgacggaggcaatccgccgttcgtaagccacttcattgagttgttcctcaattgcggctgccacatcctttaatgcagatgatgtttgtcggatgggcacttggtattcgaagaccatcacattattgccccaaatttcagtgggcaggttcgaaaccagtttggcttgcggtgcataaaaatccggctgactcgcttgcattttttgataagccaccgttgcaatttcatccgcaatttcttgactactgtgttgtaaaatccgcgtcgctctttgtcggcgtaaccgtttaatcaaccaggttaaaaaaagcgctaacgcgacaatgataacgactgacaaccaaattaacataacaatccccccacttctattgctcactaatatgataattataaccgaatcgaggcaaacacgctatttagagcacgtcgctcaatgtatactttaccgaaaagatatgctaaaatattcttaaatgttgagtaatcaacccctggacggttaatctttcgtttaaaactatgatgaataataaaggagttttacaattgatttataaagtacttttccaagcagacaaaacccaaagccctctacgcgaggcaactaaatcgatctatttagaagcagacagtgccgttgaagcacgccaacttgttgaagacaatactccctacaatattgaatttgtacaagaattatctggtaagcaccttgcttttgaacaagaatcagaagattttaaattaacggagttttaattaaatgaaactcgatattaagaataacgaaaccgccgttttcgccgtagggggacttggtgaaatcggtaaaaatatgtatggtgttcaattccaagacgaaattattgtgattgatgccggcattaaattccccgaagatgaactcttagggatcgattatgttatttcagactatcaataccttcaaaagaatcaacaaaagatcaaagccctcgtcattacccatgggcatgaagatcacattggtggtttaccttacttcttgcaacaagtccctaatgtacccgtctacgctggtccattggcacttgccttgattcgcggtaagttagaagaacacggccttttgcggtcaacagaattacacgaactaaacgaagataccgtccttaaattccgcaaaacaagtgttgatttcttccggactacccattcaattcctgatactttaggggttgcgattcatacacctcaaggggtaatcgttgaaactggggatttcaagtttgacttgaccccggttggtaatcaaccttcccctaatcttcaaaaaatggcacgtttaggtgaagaaggcgttttatgtttaatgtctgatagtaccaatgccgaagtaccaaactttacaaagtcagaacgtttcgtcggcacttcaatccgccatattgtggaacgcattgaaggtcgcattattttcgcaacgtttgcttctaatatttcacgggtctcacaagccactgatgctgcgattgctaacggtcgtaaaattgccgtctttggtcgcagtatggaagcagcggttgtcaacggtcgtgaactcggttatttaaatattcccgatgaagctttagttgatgccaatgaattaaattcgttgcccgccgacaaagtgatgattctatgtacaggatctcaaggtgaaccaatggctgctctaagccggatcgccaatgggactcaccgtcaaatttcaattcaacctggcgacaccgttgttttctcaagtaatccaattcctgggaatacaatgagcgttaaccacgtgattaataagctttcagaagctggtgctgaagttattcacggtaaagtgaataacattcatacgtcaggtcacggtggtcaagaagaacaaaaattaatgctccggttaatcaaaccgaagtacttcatgccttgccatggtgaataccggatgcaaaaaatccatacggaactcgctcaacaatgtggtgtggaacctgataactgcttcatccttgaaaacggtgacgtcttagcactcacttctgactcagcacgggttgctggtcactttagcgccgaagacgtttacgttgatggcaacggaattggcgatattggcaatgtcgtgctccgcgatcgtaaaatgctctcagaagaaggtttggttgttgttgtggcaactatcaatcttggtgaaaagaacattctcgctggtccagatatcctctcccgtggtttcgtctacatgcgtgaatcaggtgaattgattagcgaagcccaacgccgagttttccgaatgatcgtcaatacgtttaacgctaacgacaaggtcactgaaaaccaagtccgcgaagcaatcattgatggcttacaagacttcttgtttgaaaaaacagaacgccgcccaatgattttaccaatgatcattcaaagtacagaataataagttttgcgccaggtcaatatatgacctggcgctttttttattgtttaatgcaagtttttattgtcaacatttggtaaaaaccgctataatatacaacagattactttttctgaaaggcggcttgttcatgccctccaatccccatttttacatcattttaaaccaagttgccggtaccggtcaggcagcgagtatctggcctaaaattgaaactcaattaaaactacttacctgccggcaatttaggtgtacggattgatacgcatttatatagtggctatgcaatttcgccgttttatgacgcgatgattgcaaagctcattacgtggggggcaacgcgggaaattgcgattgccaaaatgcggcgattactcagtgagttaattgtctctggcattcaaaccaacgcccaattccaacaaacgttattgatcgatcctgtctttttagacgggacggtcacaacggattacttaacgaacaaggaaacagaatagaggaggggctcgtatgcagttatttaatgctgtccgtaacattggcaaggcccatctcaaatacaaccaagaagcacgtcaaaaagtgcctgatggcttgtggcaagtctgccctaaatgccagcaatcaatctaccataaggacctcggtcgttatcgaacttgtccattttgtgagtacggctttcgaacaggggctaaggagcggctgagtcggttagtcgatacgtttgaaccggcagcaccacttgaacaagatgccaatccactgcactttccgaaatatgggcataaattacgcaaggcgcaacaagttaccggattagaagatagtattttgaccgggttcgcaacgattgggccccatcacgttgggctcggcatcatggaccccaatttcatcatggggagtatgggcaggatgacaggtgagaagattacacggttatttgaagtcgcaactgttaaaaagttaccggtgattctcatcacagcttccggtggtgcacgcatgcaagagggtattttttcgttgatgcagatggctaaaacatcggcggcgattaaacgccatgccgaacagggtttactgtacatcagtttgttaactgatccgacgactggtggggtgaccgcgagttttgccactgaagccgacattattttagccgaacctaaggcgattatcggttttgctggtcggcgagtgattgaacagacgatgcacgaacagattgcaccggacttgcaagatgccgaaacggtgttgaaaaacgggtttatcgatcaaatcgtatcgcgtactgaccaaaaaccgttcattacgcagctattagcgctacatgaaagaggtgattcccatcaaacgacaacaacaaacagccgctaaaattgtggccagtgctcggagtagtcaaaagataacgacccagacacttttagcacaattattcgaggattttgtcccgttaaatggtgatcgggttggtggcgaagatccggcgattgttggcggaatcgcgctatttaacggtcagccggtgacagtgattgcgaccaataaaggcacgacgcttgaagaacggatggcgtgtcattttagctgcccggaacccgcgggctaccgcaaagcattatgcttgatgaaggcggccgagaagtttaatcggccggttatcacgctcgttaatactgcgggcgcgtatccagcggcccatgctgaaatcacgggacaagggatggcaattgcgaataatctctatgaaatgagtacgctcaaaacgccaattatcagtgtgatttttggtgaaggcggttccggtggcgcattggcgctagcctgtggcgatcaagtctggatgacgacggatagtatgtattcgattctgtcgccagaaggattcgcggcgattttgtggaaagacagtcaacgtgcggatgaagctgcggccatcatgcaattgacaccggatgcgctgcaagcagccggagtgatcgacgggattgttgatgagcccgaagatgaaagtatcttttgccaaaatatcgcgagtatgctaactgaacaattaacccaactacaacaactgccagtaacgcatttactggcgcagcgccaagccagattcagacaattttaaatagaaggaagtgtgttcaccgtgttaaatggaaagaaaatcctagtgatgggtgtcgctaatcaaaaaagtatcgcgtggggctgtgcgcaagccattacagctgccggcggtgaagtgatttacacgtatcagaatgaccgcatcaaaaccagtttacaaaaatttctacccgcatcagcgttattggtcgaatgtgacgtgagtgatgacgcggcaatcgaacaaacttttgcgacgattcaagcacaagttggcaagcttgacgagatcgtacatgcgattgcctatgccaatcgggaagaattagatggcacggtttatactgcttcacgggcaggttatttgttggcgcaagaaatcagcgcctactcattgattgcagtcgcgaagttcggtcgcgcgctcctcaatccaaatggcagtatcgtgacgatgacatactttggttcagaacgcgctgttccgaattacaatgtcatggggattgctaaggcgtcacttgaagcgagtatccgctatttagcacgcgatttaggcccagaccaaattcgggtcaatgcgatttcagctggcgcaattaaaaccttgcggtgaccggtgtaaaaggctatcgtgacttattgatggaatctgaaaaccgcacagtcgacggtcaatcagtgacaaccgaagaagtcggcaacgtcgctagtttcttgttaagtccgctggcaagcggcatgactggggatgtgatctacgtcgataaaggtgttcatttacaataatgaccgatttaattcagattaatcaccagcaaattgaagaagcactaatcccgtatctgaaacaacacctatcgctggaagtccatgcaacattggcatccactaatctttatttaaaacaacagaccccattggtaccgtggcaagcagtaattgcaacacaacaaaccggcgggcgcggccaacacggccatgtttttgactcaccatttgggggcttgtacttgagtgtcgcggttccgtttgaaaaaagtaagccagtcaacgcttttcgctacacagccgccgctggagttgcagtcgctgaaacaatccaagcaacgctccagcaaaaggttcgtttaaaatgggtcaatgatgtttataatcatcagcgaaagattgctggtattttgacggaaggggtccttgacactgaaggaactttggcgggcattgtggttggcgtcgggctaaattttgcctcaaccattgcaacccagcgaattggtaatttaagccaagccgtaaacgcccaccaagtgaacatcaatcaattttgtgctacgtacctcaaccgactagcagccggattggcccaagcggacgaggcgattggtgctcattattgcaactggtcggcgattattggccgacgtttgcaaaatgggcttgtcattacacagcttttagcggatggcacgttaattctgagcaatggctcgcaagtggcagtcggccaaaagattgattttaaggaggagctgatttaaatgacactatcggttgccagaaaagttagcttagtcgggatgtgcttggcgttattaatggttagcgctcaagtcagtctaccgatttcgctggttccagtaacactccaaacgctcgcagttggtgtaattggcaccacgttaccatggcgcttaagtcgactggtcatcgggagctatctcatgctaggcatgcttggcttaccggtctttgcaaattatgccagtggggctgcagtgctggtcggaccaacaggcggctatctgattggttttatcgcttatgtggcaattattcactatagtcagcaactatttggacaatcgaatcgcgtacttctcggcggcaatgtgctagcaagcattattcaactcggatttggcacactctggctaatctggtcattaaaattatccgtagtgaccggcttaatgaccggttttgtgccgtattttccgattgaaatgatcaagagttgtttagtggtgatgattgccagtcgcgttcaatcaattagttaaaaaaacactatccaatcggatagtgttttttagtttaacgctttaattttagcgattaacgcgttatttttaaggtatttggcaaaaactaacgcggtttcgcgatcttctgcatagtctcgaccgctttgttggcgtgcccgagcacggaggtaatacaaatgatcgacttgtttgatgatttgatttttttgactcagtttgagggctttcgtcaaaaactcgatagctgcatcaatgcggtgttgattaatcatataggctgctgtgtgacgcgaagcaaataggacgcgttgaacatcaatgacattgatgtgatcaagttggttgatgaaattgatattattattgaaataaaaatcagctaattcctcgccagcttcttggtaaattaaacccataccggtatttagaagtaacttcaacgttgaagtgtcgtcaccgatggccgctgtgaacgagttataagcggaaaaaatctgtaattcagattgatggtcaaggtaacttaaatagccattgaaaaagaagaagatggcgggataaggatgttcggttgccttgaagtcgatatcggtaattaatgcggcagcagggccagaatcgcctgctaataaagcaacttccgcagaaatcacgccttcgtcactggcagtgtcgagcgcgttaaattcggtgaaaagttcatttaatgtcaatccaagccgtgtacaaatcttaattagaattgggattgtggggggcagatttttcttttcaattttgctgattgtattttgcgtgcaaatccccgctgctaattcagactgtgtcagttgcttgttgagtcgctgttgatggatcaattggcctaaaaacatttttagcctccaaatagtaattatttatctatatttatgattaattatatacgtttaatgcagacaagtatacgtttatgacatttaatccttttaaaaaaattacgtgataaaatcgaaatgagtcaccaatcatgggtattcataatatgaaaggaggggtatgataatgatgagtaacattcaaaatttaattttctggttttggaattaaggttcgagtagggagttttatgcatggcaatgaaaatgccgctggcaatgcagattgtcattaatctaagtacgtttagttcgtttctactattagtattatttttgacggggaagttgaaacgaacgaacagatttcaactactattatcagttggagtcggcattgcttttgttcagggaatggatttattaattggaaattttcttgaagagctatggctgattttggcaactgttggattatatggttggttaaatggctttaaaaatctgcgtaaattaaagacaagttatgcgttaattatcgcaaccatctttagttacatcatcgtgatgctatcatcggttctgacaacggtggggttaattgggtatactcacttaaagggccttgataatctgatgagtagccagtttaattggcaaatggtgtgtttaattatgttgagtcaattattgattgcagccggattaggattaattgtccaacggttagatcagcttattaaagcatccattgcttcatacggtatgtgcgtggccggcacgattttagccggtctcgcgttatttgtggtggcagtgatggtgctttttgatagctttaagcatgcgaatctgccggttgaatatttgtaccttgtgttaggacttgtgctattactattagttttggtgattgtgggaatgcttttgtatacgaaagctgtgattcgccaaaatagaatcaacgtagaacaagaaagtcagcgaaatctaacgctgtatgttgaacagttagagcgtaactaccgtgaaatacgcaagtttcgccacgatatcgtcaatgctttattggctttagagacaattatcaatgaacaagggagcccagttttaatgcaggattttcatgatttactaacgcattataactttgacacgattcaagatcaggtaattggacggtttcaagagattaataatgcttatattaaaggcattatttttagcaagtatattgaagcacataataatcggattccctttaatttagaggttcaaccggatttatttaagcaacaacaacagtattttgatgaattacggattctgggaatctttttggataatgcaattgacgcggtaaatgatattaaagatggttcaatcagtgtcagtttattcgagcaaaagggtaagatggtctattgtgtcaaaaatacgattaatacaccagtagaatttggtcagctttatcaggctggttattcaacgaaggggattaatcgcgggcttgggctcacaactgctaaagaaatcacggatatgcgctcagattttagcttaatgttaaaacaagatggagactatttcgttgcaatgcttgttgttgaacaggaggagacccatggttgatatttttttatgtgatgataaacaggttttactagatagttatgaagagattataacggcatatattcaacaaaatatattggatgctcaggtgcgtttgaagactaagaatggctatgacctattaatttttttacaagaaagtcaaacgcaagggggcgtttactttcttgatattgatttagagaatgacgtgctggatgggatggaattggcgcttaaaattcgtgaattggatccatatgcacagattgtgttcgtttcaacacatgacgaacttttaatggaaaccattcaacgccgaattaatgttttgaattttattttgaaggatcgcgggttagcacaggttcgtgcagatattcaagcaaccattaacgatgccattaagttacgacaacaacaggtgccattagctgaagaaccagctcattttgaatatgatgatggattatcgtttgaaaaagtggcaattcaagagattaattatttcgaaacagcgtataaagcacggcacgtcttcttacacagtgatcatcggttaagtgaatttgtagggaaaatcgtgacgattcaagcgcaattgccacaatttttcagagcccataagagtatcctagtgaatccggacaaagtcgtacggattgataaggagacgcatcaagtgatatttgcaaatggcgatacatgtgatgtttcgtaccgtcgaattgaggcattacttaaattgatacaagcagacaagtgttaaaaattaagcaacgccaaaaattcgctctcaaacgtggtacactaaaattgataatggatgacagttttaggaggctacggattgaaactatatacaaagaccggtgacaagggattaaccagaattatcggcggtcaaaaagtgcgcaaaaacgcaattcgtgtggaagcatacgggggtgttgatgagttaaattcatacttaggtgtcgtcatcagtgatttacctgattatccggcattgagaatggaattggttgagattcaacaaattctgtttgactgtgggacagatttagcgacgccggatgattcgcgggggtatcggacagacaacgcatacacgaaatggttagaagctaagattgatcagtatgcagatgttccacctgctttaaaagaatttattttacctgggggagtaccatcagcagcgaaactacaatattgtcggacaattgcgcggcgtgttgaacgccaagtcgtcgccttgcaggaagtagaaccgattaacgaagctgtattaactttcttgaatcggctctctgattatttatacgcgattgcgcggtacgtcaatcatgaagagggcgaaccagagacagtttatcgaagaaataaaacaatttttcattaaaaaaaccgccgatgtgcggtttttttaatgtcgaaattaagggatgttttgaattgctaacgcagcaagcttccactataatagcttaaaaagaggaagtgattgtgatgtttaaatcaaaagaagctaaagtcgaggcttacgaaatgctcttaaaacaacaagctgctttgctggcaggtgaaacgaatttaattgctaatctagcaaattcttcggcgttattaaatcaaatattaccggagactgtttttgcgggttattatctgtatcaagatgctgagctgattttaggcccatttcaaggaaacgtctcgtgtatgcacattgcactaggtaaaggggtgtgtggtgaagccgccgcaaagcaaacaacgttaattgtagaagacacggcgcaacatcagaattatatcgcttgtgattcggctgcacgttctgagattgttgtgccaatgatcaaggctaatcaactaatcggtgttttggatcttgataaccgcgtcgttggcgcttacgatgaggtcgaccgagattatctagaacagtatgtcacgttactgatgcaaaactaaaaaaagcaaatgcgtttctaattgatgttagaagcacacttgcttttttttaattgattagagtgtcttgattttttgtttgaggtggacgcaaacctgtgtcaccacaatgattgccaagagccggtccagataatccgtaccggcttgaaccagtgtaatgctgacaaactgatttagtcccaagccgcttagtagttgtacaattaaacttgaccctgaagaggtgataccgttgaacaagaagtaagtaattaatgaactgacaattgtgccgggaatggcgacacctaaagcaacaaggggtaactcgcgtttcgtccgttggtggtggtataagaaccatccagcgagtaagccggttaatagaccgtctggcaagtaataaagcgcaaataagtcggtcgtgacaccgctgatgatgctactgcaagtggcagttaatgcgcctgccagaggacctaatagggtgctggctaaaatggtgccgacgctatcgagatagattggtaaccgtaaaaatagggcaatgttagcgcctacgtaattgagtgcaatggcaagtgccagaatggttaagtgttgtgttttaaattttcgcataataggttccttatctaagttttggtaagtccgttttaatgagggttgcttgtgcatttaaaacgacggtcaaaaactgttcaaagaaacgattggtgtccaccttagttaagatgaggctattggcaggacggtgccagaaatcgaaccggtcaaccagtgtttggccaatgctgatgccggttgtttcgacggtggtataactttcaaagccgtgacaaagggttggatcgataaaataggcgactgctaatggatcattgatcacacagccgataatgtgttcatattgccaatgaaaatcaaaataaaactgggtgatggcttttagatagtcgccgacttcaggattgacacgctgacaataagccagcaatgttggcgtgaagacaatttcgcgggtcacgtctaagccaaccatttcaatcttttgatcgagttggtcgaataccaacagtgcggcatccggatcgctccagtagttgaattcagcaacgggtgagcagttaccgtgactcttataggtcccacccattgaaacaaagcgggcacagtgccgacctaaatctggatttcgctggagcgcagtcgcaatattggtcaatggtccgagtgcgataatactgatatcgctcggttgactaaaagtggctgctaaaaaatcagcggcggattgttgtgccggttgaatagtggataggcgcgggatatggctgtcacctaaaccatccatgccatgcgtatcctgcgcactgacaaatggtttatggagcggtttatccgcaccaacataaacgggaatgtcgagctgcccgaggcgttcaagacacttaaaggcattgtccacgccgatttggacgggaacgttgccgcaaacaatggtgattgcaacgacttccaccgctggcgattgaatggccaaattcaaagcgagcgtgtcatcgatgcctggatcgcaatcgataatgattttgcgagtttgcatttatttctaacctccttgagatccttagttttttattctgggaagtttccgaaccagtccaagtagttttacttgattttaaatgcacccctttatgataccgagttggtgggcgggtgtaaatagcagttatttttaaaaaacaggcttgacagtgattagcgaacttgatattataataaacgttgtaagatttgatatggagaattacccaagtctggctgaagggaacggtcttgaaaaccgtcaggtgggttctgcccacgcgagagttcgaatctctcattctccttaaagtaaaaagcggttcgcggatgcgagtcgctttttttgttgggtaaaataaaaaaccagagtgcatgcgcactctggtcgattcggtttaaaattagtttgtgtaggtttggaaacgacttgcatcggtattgtagtctttagcatcggctggattttcgattgaaccaaatggcatttgcgcacgaagtttccagtttgatggaatgttccattttgcagtaacggcttcatcaattactgggttataatgttgcaagctagcgcccacatttttttctgcgagggctaaccaagtggcatattgtgccatgcctgaagcttgttctgaccatgttgggaagttttcggcatataatggcacgttttcttgaagattcttaacaacgtcttgatcttcaaagaacaagattgtcccgacaccagcggcgaatgaagccaatttagcttgtgtacttgggaagttttccgcaggtgttaatggttttaaggcagttgctgtaatatcgttccaaagtgtttcatttgcttttccaaagagaataatggcacgtgaaccttgggcgttaaaagcagttggtgtttctttaatggtgttgaagattaattctgataattcagcttcgctcattgaaacgtttttgccaagtgcataaattgtccggcgtgtttgttgtaaatcgaataattctgtcatgttcattactcccttgtgaaatcgtttttatcagtgcatgcgaataatatagcatacttattaaatgtaagcaataaaaaaagcgaaatccctcgtttgtatttcgcaattaacagcatttagttcgattgtattttacaattatagactagactgcagtttaacgggcaattcagattttgaaacgacagtccaagaattgacgaagcgcccccttggcatctaattttaagtagtgattaggttttagtgcgcgcggcgcttggaaaacgacttcgtaatgactgccatcagcacggtaagcaggttgccggtaaaggtaatcgccatgtgcttgttgtgtcccgtattggtgtgctgttttaacatagacggcttctctgggaattaagaggttgaaccggtcccactgttgggcaaggtcattgccgtccgtcatattctgagttgtggctgatccgataattggaccgccgataacaattagtccaagtgagaacagtaatagaatgatttttttcatgattgacactccttgtgaattgatgtcttaatcgtatcaagctagaagttacattgattcagtctaaaggtggaatttattctaagcgaggtgacgattttgtcatatcgtgggcctgtttaaggattgatagtttatgtctgtggccgaatgcattataatagttagttatgagatgttttcagtagagagtgggtgatgattgatgaaggaagttcaaaatgtgatgcaacagttagacgcgattcgtagtgcattgattaaaggggacatctatcaatcaattccggaaaaagtattggtcgtcatggatggcgtccaatataagacgcggcggacacatgtcgtagtacctgaggacaacgagtcagtcttgcaacgaatcacagcaattgatgagcgaattaaaaccaaaggcaaagaagcgaccatcagcgatgaagagctcgatgatttattaaggcatcttgcaagcccagattcgcaagtgcgcgataaaggtgttttttacttattcaatcgattattacggcagacggttttaaccccagcccaattgatttgggtcaaggaccgcttattgcaagatgattatttattcgcgcatattttagaacctgaaaatgacgctgtttttttacgttcgtttagcgcgatgtttttggccgggattttatatgctaaccgcactttttatcatgtattaagtacggccgaattattggcaattgaacggcgagtaatggcttatacagtcatcgaattagattcacgaggatacgttgatggtaaaggctgggcgcatgcgatgacgcatatcatcaatgtctggtcagaacttaacgaaacacctgaaatccaacgtgcggataagattttgatgatggcaattgtgctacaggcgtatcgcttctctgataacgcactcgcatatggtgaagatagtcatctgacgaacgttctaatcagtttaatgaacaagcatcaactctatgtcgattattgtttaatcgtcttacaggagtggcagcgttcattgttgactatggcaccacaggataccgttggtttttggaatcggtggtataaccgcaatcgctttttacagtcattgttgctacaacctgaattacctgataaaattgcggattacttacggaagatttcagatttattttaattaaccagataggattgagagaagatgacagtaaaagggattatttttgacgtcgatggcgttttagtggatagtgaaccgtactattttgaacaacgcttagcatttttgaatgcaattggcgcacgactaacggcagaggaaagtcgtaaacaaattggttccaatatgaatgccgttttaaaacagttgtttccaaaccatactgttttggaacgagcggcaattaaaaacggctatacgtcgtataaagcggctcatccaatcgtttttaaaaatatcatgaacccagacgcgcaaccgttattagcaaccgttgcaccgacatatcaaatcggtttggcgtccgctggtgagcgcggaattattcaacaaatgttgttggaaaccgcgttagaaccttattttgaaacggttgttagtggtgcagagattgcgcataataaaccagcaccagatgtgtatctagaagcgcttaaaagaatgcatttagaaccaaccgaggcggttgcgattgaagactctgcactggggattcaagcggggaaggcggctggtttaaccgtcatcgcattaaaaccatttgatccacttttcgcgattgatcaatcggcagcggattatcaaattgaatcattaaaagaagttccggcaatattagcaacgttataaaaaacggcttccgctgcaggaagccgtttttttgtcgtactatcgaacagcaccttaacaattaattaaagataaatgtttggtaatgtttagtatgtagtgtaaaatacttattggataaaaaaataagtaatgccacataactagttcatagtgtataataaacgcaactagtagcgtcattgctaattgatgtaaattacttcattgggttatattttccggaaattaattttaaattaaataatgatgtaattggagtatttaaaatgagaatattaggggataaactaaaacaaatccgtaaagcacgggggatgtctcaagcggagttagctaaggggatttgtacgcaagcaacaattagcttaattgagaaaaaagaacaggtgccaagcacaaagattctcttggaaatttgtaagcggcttgaaattacgttggactcagtgattgtgcaagaagatgatcaattacacgtcttgttgagtcgtgtgcaagcattgttatttaccaatgaattcaaaaaagcacgtgatttgattcagcagatctacacagatcaactggtcaaagcagatgattacaaacggtattattatttccaaggtcaaattaagttattgctggagaataaaccggacgatgcacttttctttttcaatcgtgccttcaatcaatacgttgtttctcagacggatgtttacggtattctatgtattatcggcattagcaagtcctatttgatgaagggcgctttagagcgtgtacggatttatgcagaacaagccgttgaaatgttggagaattctgatccacttgctatggccgatttccaagttgagttgcagatttataatcacttagcgggaattctttttgaattgaaggattatgaaggtgcgattaagtacgctcagcttgcgattgacgaagcaatcgataagcaaagtctttacttacttgatgcattgtatttcattcttggtcgtgcagaacatgcgcttcatcgagagaacgccttacaggatttaacggttgctaaaacattggcgttaatccggcatcatccagagattattgtgcaagttgatcaacaattggctgaataagtggttaaccactaaaaaaagccgggacataagcgtcccggctttttgattgctaatttaggcttcttcgtgaccaatgctactgcgtttcttgttgagtgcgtgtttattatctaaatctgtccgcacaacgagcacgtcgcaaacggcggtccgagtaacgtattccgttacagaaccaatcaagagacgttcaacagcgtttaaaccagttgcaccaatcatgatgagatcgatatttttcttttcgggtacttcgcgggcaattaaactctttggtgcgccatattcaatgctatagtcaacatcttttaagccaagttcattggcagtcacgatgtattcgtccattgttttcttagctgtttctgtgacttgttcaaccattgcggaatcaaaactagagatattttggaaggcgcgggtatcgataacgtgaatcaagtggagttgtccgttattccgaagggcaacttcaactgctttacggaaagcgagttcagcttcataagaaccatcgattgcgaccaaaatgtgcttgtattgttgtaacattgtcatcacctcatttaattttacatctttattgtacgctagttcagtgccaaaagtaaatcttaaaggttagttgcaaagctaaggccgactaagccggcgattaaactggcagcaacgagcgtcaccaatgtccagactagtggcaatagccagtaaatcaaagccccgcagatcgctacaccgatgagtgcaatccctgaaaagtacatcaatcgacctaaatgccggttttcagttaaatcaaagagtaggaacttcttgtcttggtagtaacataaaatcgcaccaagtagggcgataatgattaaaaaaacgattatggcgatttgaatcaatgtgcaacctcctaaaataatcaacaaaaaagggccaacgtaaacgttagcccggtcaaagtcgttggactttgggaaatctagtggtgccgtagatgcttcccgatagttgagcccgctagaaaatgcaggtgggtcagattattattagacttggttccttcgcgaaaaagtctacactcgctaataactcatccgtcccattaacgaattacttgatcggtcaacataaggtgggaagacgcgcacaccttagaaatcctactattatagtagcacgctcgtgatgttaacacaacacttttgtaaccgttcacttatgcggactggcttggcgcaagcgttctagctgttgtttgaggacttgctcgtatttaccagttgcttttgcttcgtaataatgactacctaagagcttatctggtaggtaatcttgcgcgacccagtcgttgggataattatgaggatatttgtagtcgacaccgtggccaagtttttcagcccctgcataatgggcatcacggagatgatcggggacttcaccggctttgccagcgcgaatatcagctaacgcgttatcaattgcggtgatggccgaatttgattttggagataagcagagatcaatcactgctacggccagtggaatccgggcttcgggaaaaccaagttgtttagccgcagcaattgcctcgactgtacgggcacaggcttgagggttggcgaggccgatatcttcgtaggccattgtcatcaagcgccgactaatcgacattaaatcaccggcttcaatcaaacggcccatataatggagcgcagcatcaacgtcactgccacggactgatttttgaaaggcggagatgacatcgtaatgggcatcgccatctttatcatgagtaatggcttttttctgcacgcattcttcaataacgtcaatatcgatgtcgatgacgttggtgtctggattcgctggtgttgaacgagcagcgagttcgagggcgtttaaagcactccgtaaatcaccgtttgtgacgcgggcaaggtattgttcagccgtttcatcgagattgatggctagtgcacctaagcctttttctttatctgtcagtgcccgttgaatggcaacatgaatgtcggcttcagtgaggggcttgacttcaaaaatttgggcccgactccgaatggcagggttgatactgatatatggattttcggtagttgcaccaattaagataatgcggccactttctagatgtggtaagagaaaatcctgtttggttttatccaagcggtgaatttcatcgaggagtaaaatcacggtgccactcattttggcttcttcagcgacaatctgtaaatcttttttactatcagtggcagcattcagcatgcgaaaagcgtactgggtactaccggcgatggcactagcgatactcgttttaccagtaccaggcggtccgtagagaatcattgatgagaggagtttggcatcaaccattcggcgaatgattttttgcggccccactaagtgcgtctgaccgacaacttcatcgatgttagtcggacgcatgcgaaatgcgagaggttgttgcatagcgttcatcctttaatgtttaggttgttcctagtataacatgtcgcgcaaattcgtagtgattatcgttttaaaaggttttagggatgtgtataatgagttgtataagactgaattaagaagaggtttcaaaatgcctaatcaattatttgagaacattaaacaattacgcttaacacctttattgaaccaaggtgcttttggggtcgaaaaagaggggcagcgagtgaccggattgggcgcattgagtcaacaaccgcaccccagtgagttaggatcgcgaacgtttcatccatacattgcgactgattttgcagagatgcaaacggaactggttacggataccttcgaacagaccgtagatgtccaacaacaattattagcgctcgaacaagtattgcaatcaagtatggccgattcggaatatatttggcccctcagcatgccaccgttgttaccagacgatgaattaaccattccaatttcagaatacacaccggcggtaaaagcctatcgtgactatttgacgaagcgctacggtcgacgtctacagatggtctctggcatccattataattttagcctgtcatcgacgttaattgtgcgtttatttgatgaatactatcatgatcactatgcgagtctaaaagattttagcgatgcgttgtacatccagattgcgcaaaattacgtgcgttatcactatgtcttaacgtatttatttggtgcgagtccgatagcagaaccaggctttctagaagatatgacgcaattaccagaacacccagtacggagtttacgctcgagtgaattattcggctacagcaataagcaattattaattcattttgattcagttgccgcatatgttgattcaatgcgccaagcgattgctaatggcgacttaatttcggaacgcgaattttacggaactgtgcggttacggagtcactcattggatcagatgttagagactggtgtggattatttagaatttcgggggtttgatattaacccgtatactgcgacggggattgatcaacaacagctagacttcttacacttattctttatgtacttattatccttgccgaaattatccggtgatttagccactcagattcagacgggtcgtcagttaaatgacacagtagcattagagaatccgctgcagccatcgcagctccaaacacaattgaaaactgtgatggccgatttggcccaattcattacggattatcatctgaatgagcgttttaaacaagcttggacagtgatgaatgagcgtgttcaggaccatcgacaaaccttgagttatcgcttaacacaagcgattgaagaggactcgctaaaggcatttgccctcaaacaggcaaaacgttttaaatgtgagctgacagagactccctatcagttacagggatacacggatatggaattatcaacacaaatgctgatgtttgacgctttccaaaaagggctgcatgtggctgttttggatcgcgatgaacaatttattgagctgacctatcaacatcatcatgaattagtcaaaaatgggaatataacgagtttagatcggctaattagtgggccgttagtggataataaggtagtgactaaaattttattggcaagtcatggtatgcgggtgccagcgggtgccgaatataccgctttagagacggcagtagcagattatcaagcggcgtttggtcagcgcgcgattgtcattaaaccaaaacacagtaacatgggggcgggcattaccacatttttaacgcgtccaagtgaagcggacttcattgctgcttttaaactggcacaaacgtacgatcagcaaattttagttgaagaattcattgcgggttcggaataccgtttcttagtgatgaatcataaggtccaggctgttttagaacggattccagccaatgtcgtgggggatggtcgttcaacaatcgcccaacttgttgctaagaaaaacgacaacccattacgtggcgaagcgcacctgacaccgttgcaaaacattcgcctcggtgaacgggaattgctcatgttgaaacaacaaggttaccgccctgaagatgtgccattgcgtggttcacaggtcttcttactacaaaattccaacgtctcaaatggtggtgattcggttgacgtgaccgatgagatggatcaaagttactttgcgattgctgaacaggttgctgaaattttgaacctcaatatcacgggaatcgatatcattgtgccaaacttataccaaccatatgatccggagcaccctgagatgacggttgtgctagaagcaaactacaatccagcgatgttgatgcacttgttcccaatgatgggtcaagcgcggcgcgtttcaatgactgtcttacaattacttttcccagaattagcgattgaaaccgactaaagtaatgcaaaaaggcccgcacaagttaaactgtgcgggcctttttagtgttaatcgaaaagatgttttaagaaaccaccttttttggtgggtgcatcttgcgttgtggtttttggatcagggtatagtgtatcgagcgtaattgcctcatggttaatcgcgtctttggcaaccactaacaaaccgaaggccgttggttcggttttggctgtttcgttgttaacgagcgtgaacggaatcccgtgtgctgaaagggccgctaaataatcggtagcagcggggttcttgccgtttaataagacggaatagggcttataatccgtaagatgcgcttcgaatttagcttgcgcagtggcgagttcctggttagtaatgcctaagaagacgcgttcacgtaatgagccgaggtagcggcggcgttcatcgggattggtttgtggtgcgccgtgcatggcactatccaagtgttgttgtaattgatcattatctgacaaaatagtcgcctcatttctgaattgtgctatattagaattaaacctaagtataccatgttggaggaaaaagatgtttacacgtgctgattttgatatttttgatgaccaaaccttaaagggccggttagacaagatttatacgcaacttgatccaaagtttgaagtatttggtgtgcaattgcaagcagaactcgtagtagaaacaaaacgcgaattctcgttgcatattgccaagcatttacgccgcttcaaaaatccaccaatgaatacttggatggcacttagtgagagctcacgcgggtataagatgatgccgcactttgaagtcggtttttgggatgatcggatcttcgtttggtttgctttaatggctgagatgccagataagacggattacgcaccgttattggcaagccaaacagaaagcctcttaagggactttgccgactatgatttaagctacgatcacatgaccaagcaaaaattcccaatgtcatcggagaacttgaaactgattcaagataagtttgctaagaccaaaaaaggggagtggctcctcggaaaagtttatctgaaagacaacccattattcgaccaacccgaagctctcatggccgatattcaaacgaccttgatgaagatggtgcctttatatgagttggtacagactaaatagattaaatcagacgcgtgtgctaagtaggcacgcgtctttaaatgcgcaaaaaaagagccagacctaagtctgactcttttaattgaacagataactgcttatctgttgtagaattcaacgattaaggcttcgtcgatttctggttctaattctgaacgttctggtaaacgaacaagtgaacctttcattgtgtcagcatcaaagctaacgaatgaagggcgaccaactgtgccttcgattgcatccttaacgattacaaggttcttagatttttcgcggattgaaatttcttgaccaggttttacttcgtatgaaggaatatcaacacgtttgccatcgacagttacgtgaccatggtttactaattgacgagcttgtgcacgagtgcttgctaaacctaaacgataaacaatgttgtctaaacgttgttctagcaagatcatcaagttaacaccatgcttgccttcgcggattttaccagcgcgagcaaataagttccggaattggcgttctgttaaaccatacattaaacgaagtttttgtttttcgctcaattgcataccatattctgaaatcttaccgcgacggtcgttaccgtgttggcctggagcgtaagggcgacgagcaagttctttacctgtgcctgatagtgaaattcctaaacgacgtgaaagtttccactttggacctgtataacgtgacataaaaaaatcctccaataaatgttttggagtaaaataatccgatgtaaacttagtaatcgttcagttcacttattaacaatcttcacctttgcagccgcaaggttacacaattgaaccaaaactctgggcaaatgaactgttgacggctttaccgtttactgctgcattattttacacaatggctagtatagcgtacggtgtgcggcaacgtcaagcaaattcagattaaaattgcagcttttctaaagtttatcgctaattattgctgaaccgttatcttattcatgctataatcaaacatagtttaatgaattgaagtggatgaacggactaacaaatctgatttaaattgtaaaagggtgtgtctttgaatgttttacattctcattggaatcgtagtcgtcgcactgattggctacctaagtgttgttttttatcaacgttattttatcaaacaaattaaacaactagaagcacataaaggcgacttaatggcgttgccgattccggaacgcttaacgaagttacggtcgttacatttgacgggcgaaagtttgcaaaactttgatcgttgggaaaaacaatatgagcagattaccaaccataacttcagcacgattgaaggctatctttttgatgcggaaacggccaatgccaaataccaattcattcaggttgcacggattctcaaacaattgcgggcgtacttgactgaaacggatcaagatttactggatgttcaagatgctttagaaaatctacttgccaatgaagccgatacacgtcaaaaaattcagcgtctacgagaacaatatcaacaactacgtaaacgtttgttgactaagagtttttcgtttggacctgcattagatgtgcttgaagcaacgttaggtcgcttagaggtggattttgacgaagccaacgaactaacaacagccggcgaccatctaggggctaaggccattttgcagaaattaattactgaaacaacgcaattagaagaccagatggaacggattccaaagcgctataacgaattagctaacgagtttcccgaacaactggttgaaattaatgatacctaccatcaaatgttaaaagaacattatcaatttgatgatcggcagattgaagtcaaacaacaacaactaatggatcaacttgataagagcactaccttgttaagtgatttggccattgagtcggttgaagccaataacgatgaaattgcacgtggcattgatcaattatatgatcaattagaagctgagatgactgccaagaaggcagtcgcgacgcaattgccaaccaccgcgacattcgtgcaacatgctgaacgtcagaaccatgagctattattggaactcgatcatctcaatcagagttatgcactcacacatggtgagttggcaagcgccaaacaattacaaaagcaaattggtgaagaacaggcgttagttgaagggcaccaagcgaagattgccaaccacgaagcggtttacacggcgattgctgaagatttgaccgggattgacgaacggctaactgtcatcgaagaaaaacaacaagcaattcatgatcaggttgctagtttgcatcaaggcgaagtcgtcgctaatgaaaacttacgccagtttgaacttgaactacgtaacttgaagcgcgctgttgaaaaggttaatttacctggtttacaacagaaatatttggatttcttcttcgttgtttctgatgagattcaaaaacttgatcatgatttgaatcaaattaagattaatttagacgatatcgcgaagcaattaattctcgttcaagaggatttagatgaattgaaggccaagacggataccttaattgacagtgcattgattacggagcaattgttacaatatgccaaccgatatcgtgcagattttcccgccatccaggaagcctgtgtgacggtccaaaccatttttaatgaagaatacgactatgctaaagctgtcgacttattggcaacggcccttgaaaaggttgatccaggtgcttacacacaagttgaaaaggcctattacgaccaaaagtcagacgcaactaattagtcacttagatgctcaccagtccgagacaagacgcattttgtctcggatttgttttgttaaagattaattggttgtctttaataaccaatttgctataatgtacaacgttaaaacactaatttttagtaagaaggatcgatatgatttattttgacaatagtgccaccactaaaatcgcgccaggcgcacttcagacctatcaagcggttagtgaacagttcttcggcaacccctctagtttacatgtgattggggaaaaagcctttcatattttagaacaatcacgccaacaaatcgctgatttattaggcgtagaccacgatgaaatcttctttaccagcggtggaacagaaggcgataactgggtcttaaaaggcacggcaattgaaaaacgggcgtttgggaaacatttaattacgacatcggttgaacatccagccatcattaaatccatgcagcaactggaaaaattaggctttgatgtgacttatctacccgttgatcagtttggtcgaattgatccggctgacttaaaagcagcattgcggcctgataccattttagtttcgatcatggccattaataacgaaatcggaacgtgtcagccacttgaagccattgctgatattttgaaggattatcctaatattcatttccacgttgatgccgttcaagggattggcaaaggcattcaagaggcgattttcaacgaacgcgttgattttgtgaccttatcagggcataaattccacggcccacgggggactgggattttgtataagaaacgcgggcgtcatttagcgccgcttttaaccggtgggggccaagagcatgatttacgttctggaaccgaaaatgtgccagccatcgcggcaatggccaaagccttacgtttgttattgaccgatgagactgaaaaagtacaccgccaagcagctattcgagaacgactctttaaccatatcagtcaatcggataaaacggttatgttttcacaactgacgcctgattttgcgccgcatattttgtgcttcgcaattaaaggtgttcgcggtgaaacaacggttcatgcgtttgaagaacacgaaatctatatttcaacgacaagtgcttgctcttcgaagaaagggactgaatctagtaccttaaaggcaatgcacgtcaatgaaaaaattgcgacaagcgccattcgggtatccctcgatgaatacaatacgctagaagaagcggatgcattcatcaaagcgttcgatcaaattaacgaacgcttcaaaaaaattaattcgtaaactaccatctaaaaggagataggcatgcaatacactgaaattatggttcgctacggcgaactttcgacaaagggtaaaaaccggaacgattttatcggtcggttaaacgggaacgtcacaaaggcgcttcacgagtataaacaactccggattcaccctaaacgtgaccggatgcatatcgttttaaacggcgacgatgcagaaggcgttatcgaacgtctccgtcacgtcttcggcatccaaaacttctcaccaagtatccaagttgatcgtgatttagattctgttaaagaaatggcgcttgccatgatgaaagaaatcggcaaacctgggatgtctttcaaagttaacacacgtcgttctgatcacaatttcttcttggatacgaatgatatgaaccgcgaattaggtggttacttatcagatgaattacctgaattagaagtgcaaatgaaaaaacctgacattactttgcgggttgaaattcgccaagatgcgatttacttaaccaaccaagtgattcaaggggctggtggcttaccagtcggttctgccggtaaaggaatgttgatgttatctggtgggattgattcaccagtagcaggttacttaacgctcaaacggggtgtcgacattgaaatggtgcatttctttagcccaccatacacaagcgacaatgccttgaataaggccaaagaattaacggcgaaattggtgccatacgttggtgggattaagtttatcgaagtcccattcacggaaattcaagaagaagtgaagcattctgtgccagaaggttacttaatgaccattcaacggcggatgatgttgcgtttaacggatcaaatccgtgctaagcgccaaggtttagccatttttaatggggaatctgtcggtcaagtggcctcacaaacacttgaaagtatgatggctatcaatgatgtcacaacaacgccaatcgtgcggccagttgcgacaatggataagaatgaaatcattgaaattgcgaaggatattgatacgtacgaattatcaatcatgccattcgaagattgctgtaccatttttgcaccaccagcaccgaagacccggcctaacttagataagacccggttctacgaacaacgcatcgatgtggatgccttgattgaacgctcacttgctggaattaaagtgacagaaatcaaagctggcgatcaattcttaaatcaagacgaagaaatcattgctgaactattgtaaactataaaaatcctgagaataacagtatgttgttctcaggatttttttggggagaagattcgggatttattttcagaatgaacgccggtgacgcttgacctttggcgttcactcagctaaactattaacaacgcgttgaacaagagcgattaagattgggctagtttagagagaagatgcatggctgagacgtcttccaatgaccaattaatcggtagcttgtgagctgttaacctgaaattaagtagggctaaccggacaatttcgttcgttaacaaatcatgagttggggactagtctagtcctaatttaggtggtaccgcgaaaaagcattcgtcctattgtgaggaatgcttttttgtttgccattaaacgcaatattttaaaggagtgaacaagatgactgatcacaaagaaatgtcaaccaaatatgatccaaatcaagttgaagccggtcgttatcaagattggttagacgctgatttattcaagccaaatgccaatccagatgccaaaccttattcaatcgttattccaccgccaaatgttacgggtaagctccatttaggccatgcctgggatacgaccttacaagatatgttaatccggcaaaaacggatgcaagggtatgatgtactctggttgccagggatggatcatgccgggattgcaactcaagctaaagtggaagcaaaattagctgaacaagggatttcacgttatgacttaggtcgtgaaaaattcatcgaacaagtctgggactggaaagatgaatatgccgcaaccatccacgcacaatgggctaagatgggcttatcacttgattattcacgtgaacggttcacattagacgatggcttatcagacgctgttcgtaaagtctttgttaccttatacaacaagggcttaatctatcgtggcgaatacatcatcaattgggatccaaaagcacggacggctttatcagatatcgaagtgttgcatcaagatgatgaaggggccttctatcatgttaactatccattgacggatggttctgggagcatcgaaattgccacaacacgtcctgaaacattacctggtgatactgctatcgctgtacatccagatgatgaacggtatgcggaccttgttggcaagacggtcacattaccattaatgaatcgtgaaattccgattatcgctgatcactatgtcgataaggatttcggtactggtgctttgaagattacaccagcacacgaccctaacgattttgaagtcggtaatcggcatgacttaccacggatcaatgtcatgaacgaagatgccagcatgaatgaaagtgccggcaagtataacggcatggatcgttttgaagcacgtaaagcgattgttgctgacttgaaggaacaaggttatttgattaaagtcgacccaatgacacatagtgttggtcattctgaacggaccggtgtacaagttgaagcccggctttcaacgcaatggtttgttaagatgaagccacttgctgaaatggctttgaagaaccaagcaaccgatcaaaaggtgaactttgtgccagaacgattcgaaaataccttcacacaatggatggaaaacgttcatgattgggttatttcgcgtcaattatggtgggggcaccaaatcccagcttggtaccataaacaaactggtgaaatgtatgtcggcgaagaagcaccaaaagatatcgaaaactggactcaagattctgatgtcctagacacatggttcagtagtgccttatggccattttcaacaatgggttggccaaacactgaagcgcctgacttcaaacgctacttcccaaccaatacgttggtaactggctacgatatcatcttcttctgggtctcacggatgattttccaaagtctcgaatttacagaacaacgcccattcgaacacgtcctcattcacggtttaatccgcgatgaacaaggccgtaagatgagtaaatcacttggtaatgggattgacccaatggaagtcattgaaaaatacggtgccgatgcattgcgttggttcttaacgagtggctcaacaccaggccaagatgttcgtttcagttacacgaagatggatgctgcctggaacttcatcaataagatttggaacgcaagtcgtttcgtcatcatgaaccttgaagacacaccagcgccaacgaagatgccagatgccgctaaccttgatttaacggacaaatggatcttaagccaattgaaccaaacggtggcagatgttacacggctttatgaaagcttcgaatttggtgaagcgggccggacattgtataactttatctggaacgatttctgtgactggtatattgaaatggcgaaggaagtcctttacggagacgaccaagcagccattgccaataaacgttataacttggcttatgttttagaccaaacattgcgtctattacacccagtgatgccatttgtcacggaagaaatctggcaaagtatgccacatactggcgattcaatcgtcaatgcggcttatccagaagtgcacgctgaattagacgatccagaagcaacaacgcaaatgaatgcgttaatcgatctaattagaagtgtccggaatatccgttccgaagccaatgcaccactaagcaagccaattgatgtcttggtcaacattcaagatgcgccattaatgacgatcttcaaacaaaaccaagacttcatcgaacgcttcgtacatcctaagtcacttgaaattgctgaaggtttaacagcaccagcattggcgaagacagccattatcagtggtgcagaagtttatgtgccattggctgaattgctcgacttagacgaagaaatcgcccgtttagaaggcgaattgaaacgtttagacggtgaaatcaaacgtgctaaaggcaagttgtcaaacaagggcttcacagaccgcgcaccagaaaaagtggtccaagaagaacgcgacaaacaagcagactacgaacaacaataccaatcagtcgaaaaacgagtagcagaattaaaaaatgcataagtgcatcatcaacggttagcttctgagcatttgcctaacttagcgaattggcgctgtaagcgccgatttgataagtgtagcaaagcacaggaagctgttgatgaaaacacgttaaaaaagaagtgcgactcgagctggttaggctttgaggattaacagtaaaatgggcattgtggcgttttttgccatgatgcccattttgcagttaaccggaaaaggctgctcgaggagcacgttagtgaaagaagtgtgattggttgcgggtagcaactgagcatcaatacaaaaattccgttaattcaggttttaggattaacggaatttttagattaagcggaagttgttgcaaccaaaagcacgttaaggccaccttaaaaactgaggtggtctttttgtgtgcgccagtttttaagcatcgattcgcgtgcaatctatgctaaaatagagacagtttgttaaaggagattggcgatgttagtgacagattacgaaacagctttggcgtatattcattcgcgccccagattacataaagaagcgaacctgaaccgaatgacgcaattgttggcaggtctcggtaatccgcaagaaaaccaacaattcattcatgtgactggcactaatggcaagggatccgttgtcaaaatggtcagttgtttgattgaagagttaggtttaaaagtcggtcgttacacatcgccgtttattatgcggttcaacgagcgaattgttatcaatcaggaaccaatcagtgatgccgatttagtaactgttacgcaacaaattcagacaacggttgcccagattcaaacaactgaccccgaatttgaagtgaccgagtttgaatggatcacagcaatgatgtttctatatttcaaacaacagcaggttgatgtcgccgttgtggaagtcggaattggcggtttgtatgactcgactaatgtgttgacgccgctgatatcagttattacgtcgattggtcttgatcatcaggctctattaggcaagacatttgcagaaattgcgactcaaaaagccgggatcattaaggctggtcatccagtcgtgattggtcaattaccaaaagaagcactgacggtggttgaggaaacggcaactcgtttgaatagttcgttagccattagtggctgtgatttttcgagtgctgcggtcaaaacgttacctacttgggggcaacagttaactttccaaaatgacgcggtaacgtatcgacaattacagattccgctgatgggggattatcaaattgaaaacgccgcggttgcattacaagtattttggtgttacttacagttgacgcaacaaaaactagaggttcgagacatcaagcgtgctttaaaacgggttaactggcctgggcgcttcgaaaaaatcaacgatgagccgttaattatcttggatggtgcacataatccggaaggggtggcgcaattggttcagacaacgcggcatcaatttaaaaatcgtgacatttacctgttattcggagcgcttggtgataaaaatctggatgagatgttaccacagctcaaaaaaatagcgacgcggatggtgctgactacggttcctgataatccacgcgcggcaacagcggcccaatatgcagcagttgatgagacgattacatttgaaccggactggccggttgcattaaccgaattattagcggatgtgtcggctgatgatgtattactcgtaacgggttcgctatatttaattagtacgattcgccaatattttaaaggagaatagtcaatgacaactagaggaattatttttgatatggacggtctattggttgattcggagaagatttattaccaagccaatattcgggccgctaaagaaatgggctttgattttacacctgaagatcaccatgccatcttagggaccactgatacgtatttacgcaattattttaaagcaaagcttggttcggcaacggccgcaacagaatttattgatcgttcataccataacgtagcaacggttgttgaagcagatggtgttgcaattaagccagggttagtcgatttactagattactgtgataatcaggggattagtcgggtgattgcatcgagcaatttccgcagcatggtcgatgactttatgcaaagtactggcctacaatcacggtttagtcaaattgttgcgggagacgaagtgactcacggcaaaccgaaccccgaaatctttttaaaagcgttggatagattagccttaccagcgcctagtgccctagtattagaagactcacctaatggtgtgatggccgctagtaaagctgccattccggtgattatggtccctgatttaattgcaccaactgcgataaccaatcagcaaacacttgcgaccgttggggatttggctcaagtgattccgtatttagaaaaataagcccgttaattaacgtattgttagttaaaccaagaagacgcgtcatgcgtctttttttgtgggaggcaaacaatggcggggaatacaggacaattacaaccaagagaacaattaatgcagtacggcgcagcaagtttatcgaacgagcaattggcaatcgtcattttgcgttctggtaatagtcacctatctgttggtgaggtggcgcgcaaattgctagcgcattatcctgactttcgggatttagaacaagcaagtttaacgcagttggaaacactggcaggaattggaccagtcaaagcgattgaaatccaagccatctgtgaattgagtcaccgattgcaaacgcaacgaactctccggtttggtgtggtcgcatcgagccaaatggttggccgtcgcatgattgaaacactagcgggcgaaacgcaagaacaactgctagctgtttttttagacgttaaaaatcaaattattcagatgaaacagatttatattggcacactcgatagttcagttgcgcatccgcgggaagtctttaaattagcggtccgttattctgcagcaaaatttattttggtgcataatcatccaagcggccagttgacgccgtcaacgcaagatattgccttcactaaacgaattgtcgcctgtggtgaactgatgggcattgtatgcctagaccacttgattattggaagccagcagtatctcagtttgcgagaagagggttacttagtggagtaaaagagaacgcttttttctttaagaatctgttaattttaggcgagacctgtcaaattttctgaaaatccgttaacatagtagttacattgcgttttttattacgtaaaattatgatataatgccaatgactataaaaacgtttggtaactgaaggagagaaaaatagtgttcggattagggactagaaatatcggtattgacttaggtaccgcaaacacactcgtatacatggacggtaaagacattgtcttgagagaaccctctgttgtcgctaaaaatacacaaactggtgacgtgattgctgttggctcagaagcccgcgacatgatcggccggacacctggtagtattgtggcaattcgcccaatgaaagatggcgtgatcgcagattacgatacaactgctgccatgcttaaatattttatcgaaaaatcattaggtcgctcatctagcaagccatttgtaatggtctgcgtaccaagtggtgtgactgaagttgaaaaacgtgctgtaatcgatgcaactaaggtggcaggcgctcgtgatgcatacgtcattgaagaaccatttgcagctgcaattggtgccggtcttcctgtgatggatccaactggtagcatggtcgttgatatcggtggcgggacaacagacgttgccacaatctcattaggtgggattgtttcaagccgttcaattcgaatggctggcgacaagttagatgacgcgatcatttcttacatccgtcaaaacaataacttgttgattggtgaaagaacagccgaacaaatcaaattccaaatcgcttcagcatcaccagaacgcgctaaggaaattgaaacgatgagcattcgtggtcgcgatttagtaactgggctacctaagacagtggacattcaagctgttgatattgctgaagccatcaaagaagttgtcacagccattatcgaagccatcaaagaaacacttgaagaaacatcaccagaaattgcagccgacgtgattgatcacgggattgtcttaactggtggcggcgcattgttgaaacacttaccagaagtgatttcagatgctactaaagtgccagtctttatcgctcaagatcctttagactgtgttgcagtcggaactggcgaatcattaaagaatatcgatgttatgaagaaaaattaatcgttcagtagaagtgggacaagaagcggtcagcgttgacgtagcgcctaaattagtgacagattcgggttgtgaatcgattgctataggaaggactactgatcaccggtttttgtcccacctttacgatattaaggatggatggtggcgaagaaaccatgcaaaaatttttttcaaataagaagttaattgtgttattaatcatactaatcgtctgcatgggcttcatcgcaatgtcagttggtttacgcaataacaaaaagagtccgagtttcgtacgccaatttggcaacgacgtaacgggcatcactaaccaagtcattagcgtgccggccaatgggattggtcgaggggtagatgccttaacagacttgattaatacgtaccaggaaaacaaagaacttaaagcacaacttgatgatttagctcaaaccaaggttcaaacccaaaccctcaaagaagaaaatgcaagtttgaaaaaggaactcggcttaaaaggcaccttgacggattatacaaccgttaatgcgtctgttttatcccggaatcctgataattggcaaaatgcattggttatcaataaaggggccttagctggacttaaaaaagatatgcccgtcatgtctgagtctgggattattggacggattgttgaagtcaacaagactaattcgaaggttgaactcgtttcaagtacggatcaaagtagtaacggatttgctgctgtggtgaataccaaagatggtaagcaagttaatgggatcatgtccggttacaatgctgaccggaaacaattgaagctcgggcagattaagaccgatgcggcaatcgaaaaaggtgacaaagtaatcacgtctggtttaggtggattaacccctaaaggcttgtaccttggtaaggtagcagcagttaagaaagacgattttgggttagcattaactgtttatgtgaccccagctgctgatttaaacaatttaaccgttgtgactgtcatcaaacgaacgattgaaggtgagtagcatgggtgtgacgcgattacaacggcgctatttattaccaatctacttactcgttgcgttttatttggatggcgccatcagtcatttatgtgaacaatggttatatacaccagatcatacgttgattagccggctatttatgctcgtgttagtggtaacggcctttgttttaccagaggaacgccaacttacgtggtatgcagcagggattggtcttttatacgatttgtattatacggggatgatcgggatgtacacttttgcagtgccgctcattatctatacagtgcgttatttaaaacaatatttacctgactcagcctttttcattgggctaatcgatgtcttgtgtttaacattactcgagagtacgatttacatcatgaatcgcttgattggttatgcaacagtaacaccagtcgaatttattagtaatgttttagcaccgacaattgcattaaatttggtttattttgtctttttgtatttgcctttaaaatatttattgctaaaattaaaatcagaacggtaaggggtttgatttttctatggatgcagtcacgttacgaggacgcaaagaaggttttgaattaaacattgatgcgggtgcggatttcgatcaagcattagttgcactagcggaattattgaataagattcgcttagagcaaccgcagttggggagcgatcagattgaactggagctgaccactggtagacgcttgttgaatgatgcgcaaaagcaagcactggcgaccgtctttgagcagtttccagaatttaatgggacaagcattcaatcggaagtcatgacgattgaacaggctgagattgatcggcgggaaaatagtattcacgttgaacccaatgttttacgaagcggccaagaggtcaattatgttggcgatgtcttattcgtcggtaatttacaccaaggcgcaacgttaaaagcaacgggcagtatcttcgtacttggtgaagttgccgggattgtgcacgctggttttccagataatgcagaagcagttgttgcaggtgatttatcacacgcgttacaattgcggatagcagacgcagttgagattctcgatcacaagaagacgccatttacggcacagagtgtaagtttcatcaatgatttacatgttatcgactacggtgagttaacggatttgaaacagattaatccaaaattatatcgtaaaatgaaggagcaataaaaatgggaacagctttggttattacatccggtaaaggcggcgttggtaaaacaacatcaagcgccaatattgggacggcgcttgcgcttttagataagaaggtttgcttgttagatttagacattggtctgcgtaatttagatgttgtcttaggattgagcaaccgcattatttatgatatcgtggatgtcgcccaaggccgtgctaagttgcaccaagcactgattaaagataaacgttttgatgaaaaaatttacttattgccagccgctcaaaatgcggataaagaagcgttaacgcctgatgaagtcaccgccatcgtgaatgaattaaaagaagaattcgattttgtgattcttgattgtcctgctgggattgaatctggctttaaaaatgcgattgccggtgcagacggtgcaattgtggttgcaactcccgaaatttcttctgttagtgatgctgaccgtgttgtcggcttgctagaagaagaagaaatgcggattgcgccacgcttagtaattaaccggattcggcgtcatatgatgaatgaaggcgaaacgatggatgttgatgaaattaccaaacatctttcaatttcattgttaggcattatttttgatgatgatgcggttatcaagacgtccaatgccggcgaaccaattgtgatggatccgaaaaacccagcaagccaaggctatcggaatattgcccgtcgtttactaggcgaaacagttccattgatgactttgaaacaacacaaggttggtttctgggcccgtcttttcggtaagcaataaacattaaccattgacttttgatgcaatattgaatagaatgaataacaatacattaaacgttgaacggtccaaattaattcttgaggttcagagagctgatgcgtggtggaagtcggcccttgagattaatggcacaaccgtgagtttgatcatcgaataaagatgatccgttagcccgttatcgctgtagttttagaaactacataagtttaagctgcgtgagcagtttattaaactgaggtggcaccgcgataaattcgtcctcttggagaaatccaggggacttttttcattggtctaaaactaactgagttgtttgttgtgaggcaaacaaaaatttgaggtggcaccgcgaaatttagccctctttgtgttttaaacgcaaagagggctttttattttggacaaatgagaggagtctgtcatgattgactatagtttatcgattttaccagcattattaagtggggcgcagatgacgttggctgtttttggcctaacgattattggcgcgattccacttggtttattattaagtttagggttattagctaagtttaaaccactgcattatcttttagatttatatgtgtggctgatgcgtgggacaccgttattattacaactaatttttgtattttatggtttacccgtggtcggaattgtttttaaccggttcgatgctgctttaatcgcttttattttgaattatgctgcgtattttgccgaaattttccggggcggctttcaagccgttgataatggtcagatcgaagcagctgaggtcttaggcttaacttacccacaaacaatcgctaaaattatcgtgccccaaacggttaaaattgtcttaccgtctgtcggtaacgaagtgatcaacttgattaaagattcatcgttagtgtatgttatcggcattggggatttactgcgggctggcaatgtcgcaagtgcgcgtgatgtcaatctcttaccacttttgctagtcgggattatttatttattgttaacagccatttgtacatgggcattacggcgtttggaacgctattatcgctattatcgctaaggaggcggcaacatgtttcaattagaaaatatcaatcaatccttcaaaggtcggcaaattttgaacgacttaaatttatcagttgaatcagggagtattttagcgattgtcggtccaagtggtgctggcaaatcaactttattacggttaatgagtgggcttgatcaacccgatagcggacggtttattattgatggtaaaccttacgaacctagtaatcgggaacaaggggcgcgcattggcgttgtcttccaagattttcggttattcccacatctttctgtccttgagaatgtgacgctggcacccatcatggtcaaaaaacaacccgctaaaaaggctaaagcagatggcgcaaaattattacagcaactagggttaagtgctcaggcgacggcttatccgttccaactatcaggcggtcaacgtcaacgagtcgcaattgcccgcgcattggcgatgcaaccggagattctctgttatgacgaaccaaccagcgcacttgatccatcgttagtggcaagtgtcgcacaactcattttagatttgaaacagcagggaatgacacaaattgttgtcacccatgatattcaatttgccaaccagattgctgatcaaatctttgaattacaaccaaacggggttcaacaaaatgatgaagcttaaaaaaacagcattaatagcggctttattgatgatcatgattggtttagcagggtgcgcacaacgcaatcagcaggctgatcaatgggcaacgattcaaaaacgccaaaaaatagtcgtcgggattgatgatagttttgtgccaatgacttaccgtgagaagaatggtcaattaaccggttttgatgttgatttggcacgggcgatttttaaggggagtggcattcgggttgactttcagtcgattgattgggatatgaaagaaacggaattgaataatcaaacgattgatttaatttggagtggttattctaaaacggcgcaacgggcaaaacgggttgcgtttagtgacccgtatctgactaatcggcaaatgattgtgtcgctcaagaaacaccctgttaatcaaatggctgatttaaccaaccaaccattaggcgttcaaacgggctcatctgggatggaacaactagagcgttatcctaaacgattacagcaaagaattgccaaccatgcaccaatcctatatgatacttataacaatgcgtttatcgacttacaggccgatcggattaaggggctcttaattgatgaagtctacgcgcaatttgaaattaagtcacgccacaacggcagcgattttcaagccatcgacagtccttttgcagcagaacagtttgctgttgggatgcgtccgcaagatcaacaattacgtcaatttatcaaccgacgttatcgggtcttacaagcaaatggtacgctagccaaattaaaagcaaagtggtttaaagaataggatgaatgaagaatgacagcaatcattatctgggggatagcactgatttggattgcaaatacaatcggggctgttatcaccgtatttcgccaacaacgtgatattgcagcaacctgggcctggctcttggtattgattttcttaccaattatcggctttgttttgtatctatttttcggaaaaaaattaccggaagatcatatggtcgatttaaaaacacaagaacggctcggcattgatgccttggtgacctcccaaaaagcagcgttacgccaagcgcagaagcaacacacgttaccgccagaaacgcagagcttaatcaacctcttcttagtatcaaataccgcggttgtgacccaggaaaacaatgtaacaattttaacggatttgaaggcggcgtatcaacagttgttaacggatgtcaatcgggcgcaagatcatatccatcttgaatactatgctttttatgacaacgaacacgggcgtcaactggtcaatctattggcttacaaggcactgcggggggtaaaagtgcgtgtgatgtatgatgcatttgggtcgcaacatttatcccggcagttctttaagccattggaagcagccggcggccaagttgtcccgttttttagttctcggttccggttcgttaatctacgctttaactttcgtaaccaccggcaattggcagtaattgatggcaataccgcctaccttggcgattttaaccagaataatcatcacgttaatattcctgcacgagatacgcggattcggattaccggcgatggtgtgttatcgtttcaagctcgctttttcatggactggaatgcggctacgcgtcaggaaaaggtgtattacagtccgcaatattttcctaactcagatgaacacgggcagactagcatgcaactggtatcaagtggacctgatcgagaactcgatgagattaagttaggctttttgaagatgattgctgccgctaaaaaacggctgtggattcagaccccatattttattccggatgattctgtattggcggcgttagtgttagccattaattctggggtgactgtgaagatcatgatggccaaacgtgcaaaacataaaatgattcatcatgcgagtttgtattacgctagacaaatcgtgaaggcgggcggtcagatttacttctctgaatcaaccggatttaaatcacgcgtaatgttagttgatgggcaactagcagcggttgggacggctaatttagatattcgcagttttagattgaattttgaaacgaccgcttttttatatgatgcacaactcgcaactgaacttgaacaatcttttacggctgatttaaaagaatgcttaccatttacgaaacaacggatacaagagcaaagcaatcaagaacgttggtcacagaacttagcgcgtttgtttgccccaattatgtaaaaaaagaaccgtcagatttaatctgaccttaaaaaatgacctcactctatgttaaagcctacaatttcctaatctatattttttattttaccaaaactacattgtgtagtatcttttaaatagttcataattacaatgaattttatagttacttactctttaacatatctctcaatcctcataaccaagaatgttgatttttaagcagtcctttagaatccggacatacttttagatcattcatattcgtttaattaactattgaaccactagaaggcacctctctactcattttacacttttcatccccaaaaaagatccatataaataataacataatcctcaaaaaccacaaaaataacggccccatttagggaccgttatttttttacttttaaatcagcggattttcatccaccgccggcaagtatctgccagccaatccggcaattaccgttagcaagccaacgctaatcaggccggccaagtgaatcaactgactggttgtgtcagacattgcgacgctgccactgatttgggcaatcacggccgttatgtcttgttgccgcattacggctaggcccatcaagccggtgatcaagataaattgcattaggatactaccgagatacgtattccgatatttaataattaaggtttgggccggcgtcgtgacgccggtgtaataagcgcgatgatttaaaagaatgctgttggcactgccaaagaaactaatcaataagatgcctaataaaattagatgtggcgtaatcatcaaccacgcaccagcaacaaatcctagtaattggacttttaagtctgataacttcgaaaagcgcccttgcacgctctttctaataacttgggctaaaatcatccctgcaccgtaagtcacgtaggcgcctatcatcaaactctgattttgaattgcgacaaaaatatagagcattaagaatgtttcaaacaccccgttaattaaagccgcaaccaaaagccaacccggcatcttcgttttagtgccgcgcgtgatgatcacccgcaagattagcgcgactaacccaatgacagcgactgtgattaataaccagacaaatttagcttcaaaaaggcgcagatatcttagcgcaaacgccatcgcggttgcccagacaaatagttccaagttattaagcgatttggtttgttcgacgaacaccgattcatcaagttgcttcacaaacggttcgaagcgttgcatgccaatgaaaccaatcaatacaaatagcatgataacaataaagatgaaccgatatgaaaaatgactagcgatggtcaacagaccaaccgttattaggctaaaagccaataacgttttaatttcagtgcccataaggtgccatttccaaaccactcgctcgtgataataaacgccctcataggttggcatgatcacactggcgctggcccccaagataaaagccgccatatcggttagatacaaccacggcgaaatggccaataacaataaggcaccagcagctagcagcatactgatactagttattttaaatgaattctgcacgtggcctagactattcacgaataataagccagttttcaacgcggtatagaataagatatacggcatataagacgccactgactgcccgctatgaatcatggttaagccaattaaagggagaatttgaattaacttcgccaccgcaaagacaatcccttgtttaattttttcactagtcgctaattgttgcccatttgtcatcaatcatccctactttcattgattagacggtaccttatattgcgtctgatttcaaagaagtaccgttaaaagcctaaattgattgcacaaaaaaaaacaccgtaagtcgtcgaaacgacttgcggtgttttgattaggattttattcccactccactgttgaaggtggcttgctcgtaatatcgtacacgatgcggttgacgtgatcgacttcgttaacgattcgcacagaaaccttttgcaagatatcccatggaatccgtgagaagtcagctgtcatgccgtcgattgagttaacggcacgaatcccaactgtgtaatcgtatgtccggccatcacccatgacacccacactacggatgcctggtaaaactgtaaagtattgccatacagttttatctaagccagcgagtgcaaattcttcacggagaattaaatcactatcacggacaatctttaatttgtcttcagtgacttcaccgaggacccgaatcccaaggccagggcctgggaatggttggcgccatacgagttcatatggcatgcctagtttttcaccaaggtcacggacttcatctttaaataatgtatttaaaggttcaattaagctaaattgcatgtcttctggtaaaccaccaacgttatgatgtgatttgatggttgtcgcagtacttgtaccactttcgataatgtcagtgtataaagtcccttgcgctaagaaatcaattccgtttaacttagttgcttcttcgtcgaacacttggataaattcgttaccaataatcttccgtttcttttctggatcagaaacgccagcgagtttactcatgaaacggtctttagcgtccacttggatgatgttcaacccaaatttaccgccaagactttccatcacttgttcaacttcgccttttctgagtaagccgtgatcaacaaagatgctgaccaattggtcgccaattgcgcggtgtaataacaccccaacaacagatgaatcaacgccacctgaaagaccaagaaggactttcttgtcaccgacttgttcgcgaatcttttcgatttgcatgtcgatgaaatcgttcattgtccagttgtcttgggccccacagacgccaaatgcaaagttcttcaaaatatcgttcccgaattcagtattccgcacttcggtatggaattgaatcccataaatccgacgttcacggttttcgatggcggtgaaaggtgtattatcactttcagcaaccgttacgaaaccttctggaatcgctgtgactttgtcgccatgactcatccacaccgtttgtttttcaggaagacctttgaataagtcactgtctttgtcagtgactgtaatttcagccttaccatattcacgttctgttgatgcttcaacattcccgccgtttttaaaactgatcaactgcatcccgtaacaaatcccgagaattggaatccctagttcaaaaatttcggggtcaactgaaaaggcaccatcatcgtaaacactcattgggccaccagagaaaataattcccttaggggcgatcttcttgatttctgctgctgttgtcgtgttaggcaacaattcagagaaaatcccgaattcacggatacgacgtgtaatcaattgattatactgactaccgtaatctaatacgataatcttatcgaaatcttgcatgtccttttgggccaaacaactcactcctctttttaaaaagcaatttggtgtgaacaagtaacaccaaattgctagattcatagcactaagtcaaactataatgtatctattttactgattaataatgaaaacgtcaatggattgacggccttcctgtgaaaaaactcattctattattaatatttacgtaggaataccttatcaatcacgtgatgttttgttttatgcaaaatgacatcggcacgattacgcgttggtaagatatattcgtttaaattttgtaaattaatgtcacgccatacccgccgcgccatcttgaatgcactctgtcggtcactgatggcgtatggataatagtagttggtcggatcatctttggctaaatcgagtaatagatcgaaacgttcaaggaaccacttcttgattaagtcggcttgcgcatcgacataaattgaaaagtcgaagaagtcactgacgtaaatctgctcagttgatggcaactgtagtacgttaattccttcaacaattaaaatatctggatcgtcaatcacgtcgaactcgtcgggcacaatgtcgtaaatctgatgtgaatatttcggtgctttgactggtccaacattatttttgaccgcattcataaattgaattagatgcggcatatcataactttcgggaaagccttttttatcaagaatccctttttgtttcatcgtggctgtcggatataagaacccatcagtcgtaatcatttgaaccttcttatccgggtaggcccggctgagaaggagttgcaacaagcgcgccgtcgtactcttgccaaccgcgacgctcccagcgatgccaatgacaaatggtgtcctatgtggcttaatctctagaaattcagatttttcggcctggcgtatctggtactgttcatagtgcatctgtatcagatgccgtaatggcaaataaatatcactcacatccgcaagtgaaatccgatcattcaatccccgaatctgttccagctccgtgtccgtgatgccagtatacgcgtcaccgcggccatgaaaaacccgccactcatcacgcgagatttcataatatttcatctcgttcttcatccgacaatcctccaatactaaacgcatccattttaacattaaaaacagagtgcgtcatcttgcgattatattccgaggaattagtctagtaccgtgaataagcgccttaaggcgattgtttgcggtgcgtaactaaccacaggaatatgcaagatgaaagcacgtttcaaaacagagtgcgtcatcttgcgattatatttcgaggattagtccagtaccatgaataagcgctatttagtagctcgccttttttctttatgaatgattatgatcagcatcccaaagttaagcaaactaatcaccgtccctattctctgaatcgtagttgttcgataataaacggtgattctaccagttcccttcaacgcaacttgtgttaacccagttcgtttattcatctgcattggtaatcgctgatgatggttgagttcggcaacgtaccctttgtaataaataaaggggacttcaacaactgctttttgatccgtcagtgtcctgaaatcaaactgataacggccccatgtatgccgtacatttgtaatttttattttatgcggctgatacttaacgacctgttttttatgtcgcaaaattttctggtagtcggtttgagcaggtaaatactcatgtccggccccaatgtaataagggttgggcgtgttataggcagcattcgttctaaagcgccaactttggctttgaatactattcgtagagtagatgacatttcctgcgcccaacaacagaattagcagataaaagtagtacttattctttaataaatgacattcatccttagcaactaagtaactcacaattgccgtaataatggcaaaaaaacgccacgggaactgaatcgtattgataattgtatgatccaacaaatgccacggcataatcgacgtcgtagctatgaatagccccaacgcaatcccaattaaatcacggtcgtttttggaatagtaaaatagaccacacgcgatgcctaatccgagtagaatcgtgataccgacattcactgtattcgcatgaaaaacagcattcgttaatgaattaacaacaatgtctttaaagggtaatgtgcggtcagataaaaatgccaggggttgtgcggttacttgaaaaatcgtggttgccatttgttctccaaccgctaagaaataacgccctaataaaccgattgctaataagccagcagcaatgagatactttaaacttttattttggtagaatctcttgagatttaataaggtataaataatgatgacaatgcccatcatttcaacagaaatcatatgactataaccaatagctgccatccctattgataacagataccaataccggtgctcacctttttttaaccgcgttagcatcacaatcattaatgggaaaaaggtgagcgcgatcacctcaccaatggcttgccgattaactaaatctgcaaaacgataagtactaagaccgtacatcaaagagaatattaatgcttgcttcttattaaaatccgctaattttcctgaaatatatgtgattaaaaacgtactaaaattaatcgcaattgcaaatacaataaaactctctttgattgatagtcctactactctcagaatagctggtaagtagagaaaagcatctgggtaaaaaagacctgccgcatagcccattccgccgatgaaaaagtaactgattctcggaaaccactctccctgtttaatcgaaagtgccaaattctcaatgcggttcatgtggaaatgatagtcagaaccagacaggattttattgggctgtaaatagacgattgcaaccatcgcaatacttaatagtccaaaaaataatagggttactgttaaggcatgtcgcctgtaaaaatactttaatctttgcatcatatactcctcataaaaatactttagtatcgataattgccattccagcatcagtctaagggggacgatcgaattataagtaagtataatataaataatgtaataatggacattatttatatataaactttaacgaatagaatcggtcaatgtacaatattttgtttggcaattaataagtaatccataagctaagaaagcgataagatgcaaaaaagcgggctaaataattattagcccgctttaaaacccattaaatttataaataaacattttaataattaaaagcgctttattaaaatattcattgtccattttctcgcgattacacttttcatccaatcaaaaaacgcccgcctttcagcgcgcgttttttctatttaattaacgtgtaatcatccgcatccacattatcaatcaatggtgacatgccacctgttgctaataaagtgaggcgatgcatcgctcttgaacagatcgtgtagagcaattgccgttgatcttcatgattgtagttagttgcgctgacttgccagccgataatcgcatcaaattccaaccctttggctaagaaacttggaacgactaacgtgcccgctgccaaacgttgattttcggaacgaattaaagttacttttgtaccactggctttcaacttagctgttaattcttgggcttgcaccaatgtcttggtgataatcgccgtcgttaacttatctgcttcatttttagcgagttgcgcattcacatcagcgaccaattgatcttcgctttggcgcacaatcaagtttggcttgtcgccttcacggttgaaagcttcaattttttgaccgccctttaagagccctttggtaaagtcggtgacttgttcagttgaccgatatgaacgcgtcaattgaacgaccttcgtattttgcgcatcaaagagttgttgcacttgttgtaataggttcgtgctgttttctttggtgaaaatcgcttggttcaaatcaccgagtaacgtgaagcgcgccttagggaagtgcatcttcaagaaggccaattcgtatggtgtgtaatcttggatttcatcgataaagacaaagcgcatgtcgcgttcgccgtgcttaccggtcattaaatcataaagatgcaagtaaggtgtcacatctgataacgtcatttgtttggcctttaaattagcgacaaaatcagtcacatgatcattccagatttctggtgtcagatcaaattcagccaaatcaaccaattgcggcacaacccgcatgaagtggacgtattgtgcttgaatactcaagaagcgattgcgttgaattcctttttgaacgggtttgaaagccttcaaaacgatttgcttagcgatatatttactttccgcttcaccagtcttaaagtccttacccgccataatttcgcggagttcctcatcacttaagttttcagcgcgttctgtcacccagtcagccttcgtttcatggtcgactttatggctcaaactgcgcaataaactttccttcgtcgcatctagccggttccctaaatgatagttttcgttgaaacggtagtagacgtcgctgatttttttcttactaatcaagaccttcccgttcactttcaaatcacggaaacgcatatcgcccttttcaaggtgcgctgcgtaacgtttaactgctttatagaagactaggctttctttcaaacggctaatccgcgcatcagtttccgtgattggtgtttcgaattggtcaaataaactctgaacagcaaggttcggcaaacgccgtgcaacatattgatagtaagtcatttgaatcatgttttgttcgccaagttcaggcaacacgtcagcgatataatcgttgaacaattggttcggcgagaacatgatcacttgactggaatccaggttaccccgataccggtaaagtaggaaggcaatccgttgtaaaatcgcggatgttttcccagaaccagcggccccttgcacgaacaataagtccgcgtcagtgttccggatgatttgattttgttcccgttgaatggtcgtcacgatactcttcatttgtgtatcagacttttcgcccaatacttccagtaacatttggtcaccaattgtttcttgcgtatcaaataacgccttaatttggccatcttcaattaagaattgacgtttcaaagaaatattgacgtcttgcgggccgtcaggcgtttggtacgtaacttcaccagtcttcccttcatagtaaattgatgaaataggtgcccgccagtcataaatcaagaaatgatcttcgcgatcggtgaatgaccctagcccaatataaatggactcagactttggttcacccttttctttaaaatcaatccgcgcgaaataaggggttttttccattttttgtaaagtctcaagttgccgggaagattgttgccaagaattattccgttcttgcaacatttgccgttgttgttcgattgagactgccgtttcagtcattgctgaatcattattgaaattcaaccgtacatcattaaagaagtttgcgttaatttctttttcttctgatttagcccgttcaacggcgccttcgaagtgcttttcggcgtttttaattaaaccgacaatctcggttaaacggcgttgttctaatgatttttgttcgtcagtcaaagcagatgtcccccgatttctaaataaacagttctacaagtttaacactaaattcacaagagtgcgacgataggcgcttatattttgagcattaactggatttaccgaattggcgatgcaatcgtcggttcggtaaatttggttaagcgtagaaatatgcctatcggagcacgtttagagtgcgtttgaaacggtttaactttcgagcattagcctaatcagggaaataagcgatgtagtcgattgttttcctgatgtagctaagcggaaaaagttatttgctagagcacgtttcacgatcttcctacaaaaaagccggccgctgcaaccaccagccctaacccgtaggttaatagcagataaccaaagaaaatatggtaacggcggcgaaaccacagctgactcaattcgctattgaacgttgagaaagtcgtgtagccacccaagaccccgacgcccaaaaagggcgtccacgtttgatccaattgtgccccggtcacccaacctaagcaaaagctccccgttaaattaattaaaaaggtgattaatggatattcgctggcaatctgcgttccaagacgggttaattgataccgcaaaatagcgccgattgccgcgcccaatccgacaattaataacgtcatcattttagcacctgcgactttccttgccgatcgagcagccaaactgcccagtaatctgccactaaacttaagcagacaccgccaatcaaactaatcccgatatacaggctaaatggccaccattgattggccaccaataacttcaatgcatccacgctaaaactagaaaaagtcgtgaaggcgccgaaaaagcccgtgcccattgcaagtgccagcgtatcgctaatctgataacgaaccacgatgtaacgcattaaaaaaggaagacaaaacgccccgattaaattcacacacaaagtgccatacggaaaccctgctgcttggtgcaatccgagcccaattgcatagcgtaaaatcccgccaaaaaaggcaaaaattccaaccgcgagactttcttttatcttcattttagatcgccccctttttaatatcgtagcatctattttacagaagttattaccaattgtaaattagttgtagatattaactagcgataatgccaactttttaataataatttaatcactaacgaattatcaacaaaatcgataatattagcgccaatatataaaaagccaattttacgaacccgtgctgttgctcggaagctattcggctttgacatgctttagtaggttagtgtatgctctacacaactttattgagcattgaaaggatcttttttatgacaagcttagcgctcgtaatcgttctattggcggctttaatgacgccgttactcatggcaaaatttaagatttcttatttaccaaccgccgttgcggaaattttggtcgggattttactcggacaaagtggcttccacctcatctcaaccacccccacactgacggaactttcatcattgggtgtgaccgtcttaattttcttaagcgggatggaaatcgactttgaactctttaaaaagcaacccaccacagctaaatctggcgttaaaacaccgctgacgcccttacaactggcagtcggtagttttacgctgatcctattaagttcgctaggactcgccagtttattggcatggagtgggttgttcaccgatattggactcgcaacaattctcttttcaaccatcgcgttaggggtcgtcatcgccgcgttgaaagaaaaagaactcctcagccagccgcttggccaaacaattctgttaattgccgtcctcggggaaatcgtcccgctgatttcgttaacaatttatgccgccctcaataatcctggttctaagagtctgtggttactatcactaattttcttagccgcgatcttcttattgatgcgttttaaaactgtttatcacttctttgagcggattgataagtcaacgactcaactcgatattcgtttagcctttttcttaatcatcacacttgtatcgattgccgaagaagtcggtgccgaaagtattttgggcgctttcttagccggcatggtcatgaaacttttacgcccccgtgaagagacgcaagataaattaacatcaatcggctacggctttttcattcccatcttcttcattatgaccggtgcaaaactcaacatccccgcgctcttacgtgatcctaaatcactgaccctgattccctttttcttcatcagtttcatgggcgccaaagttttgatttatttcgtcttaaaacggcgcttcaaagtcaccaacgccctcgccgggactttcctcagttcgacaaccatcacgttggtcttacccattttgacggtcggtctcaacttgaaggttatcacgacacagcaatccggcgctttcacaattgcagcggtgattagctgtattcttggtccgattctgttcaatcgattctacttaccaacacctgaagagatgccgcgcaaacgtgttaacttcatcggcgcaaacatcatgacaattccaatcgcccaacagttatccaaaggtctgtacacaagcgaattatttaccaataacgaacaaaattatcaaatctaccatagccaagccaacctcgaactcttgcctgacttggcaccagccaccttaactgacgcggccgtcttcgatacagatatcctggtcttaggctatttaaataatgagcaaaattatcaacttgcccaacaagcgattcaggccaaagtaccgcggatcatcgcccgctttgaatttaagaatatctcggacgatcaatacgatgaacttaaagaacatggcgttgaaatttttaacacttacgaagcaaatatcagtctgttgcgaagtttaatcgagactccatctaccttacaaatcattgataacaccgatgccgggctcttcgaagtcatggttaaaaatcggcgcttcaccgggattcaactttctaatctcccatttgtggaccaagtcacaattagtcgaatttaccgcgataagcaactgatcatgccgcatggtgacacgcaaatccatctcaatgatcacctcattctaacggggaataaacaggctgttcctgccattcgacgccaattagaaacgctcaactaaatcatgttgaccctcgcacattctctctaataggtttataatgaaactatcataattaaaggatggtgcagatatgaaacaaggaacaacaatcctcacattggataatggttaccatttatggactaatacgcaaggaacaggcgacattcatttactctgcttacacggtggccctggtggtaatcacgaatactgggaaaacttcggtaaggaattagctgatcttggtgtacaagtacacatgtacgaccaacttggttcattttattctgatcaacctgattactcacaaccaggcaatgaccaattattaacatatgattacttcttagatgaagttgaagaagtccgtcaaaaactgggcatcgacaacttctacttaatcggccaatcatggggtggcgcattggtccaaatgtacgctgctaaatatggccaacacttaaaaggtgccatcatctcgagtatggtcgatgaaattgacgaatatgtcacaaacatcaacaaaattcgtgaagacatcatgacccctgaacaattgaaattcatgcaagactgtgaagctaagaatgattacgacaacgatgaataccaagcacttgttgacaagttaaacgctggttacgttgatcgcaaacaaccacttgcaatctcacatttaatcccaacaatggcaaccgacgtttatggcgtcttccaaggtgataatgaattcgttgtgactgggaaattaaaggattggcatttccgtgaccaactccacaagattactgtcccaacgttaatcacatttggtgaacacgaaaccatgccaatcgcaaccgctaagatcatggctgaaaagattccccatgctcgcttagtgacaacgccaaatggtggtcaccatcacatgattgataacgcacccgtttacttcgatcacttgaagactttcatcaaagacgtagaaaatggcaactttaacgattaaataaaaaaagccgcgcacaaatttaaatttgtgcgcggcttttttgacctaatcaataatatctgaattaggttcccatttatccagtgtatcgaataagtggtttgtttgtgcgaataattgagaaaggtctgcattgccgtcatctttaaaatgtttaaagaataagtagaaatcgacttccaattgatcaaccattcgtaatccttgctcattcaatgaaatgaatactttacgttggtccatttcatcactgcgatttttaacaattaagtgttttctgaataaaacattaattttacgtgaaattgctgggcctgaaagatcaaaggattccgataatttcgccacttcaatattggggtttaatttgacctctctgagaatcaaaaattgatcgtatgtcaagtcgtgcgtgacagttaaatgatttatcttattgtaaatttggccaatttgcagataccattcgttgaatcgatcaacaaggttactatccgtttctggttgcatcgaaccactcctttacataaacactaaacgtggttattaagtgttactagtcaaaaataacacaaaatgtataaaattaaaagatttatgcttaaaatattaataaatattgataaagttatttattagtatcttttaaaatttattctctcttaatgataattgcaattgcttataaatcaattgttattattaccattaaaaattataaatgtatataaccgttttgcaaaaaatatggaatgaccctgcacaccatttttatctatgctagaatgaaggtactaaaagctattgttggagggttacgatatgaaacgaatcacactttatttagtgcgtcacggtcaaacattctttaaccgttataaccggatgcaaggttggtcagactcaccacttactccgaaagggattgcagatgccgaacgcgctggcaaagaattagcgaaagttaattttgctcaagcttattctagtgaccgcagtcgcgcaatggacaccgctaaaattattctccataagaatttctaccttgatactccatatgctatcacaccgcacttccgcgaagaattctacggctattttgaaggtgaagattcacccaaagcgtggtacatggcaggtgccagtcatgatgccaaaaccttccaagaaatcatcaccaaatactcactcgatgcctctaaagatttcatgaaagaagctgatcccttccacgatgctgaagatgccgctgaatattgggcccgcgtcggtaaaggtttcaaacaacttcgtgctgaatgttctgacggtgataaagtcttgatggtcagtcatggcacaaccattcgcagtattgttggcaagtttggtaacgaccaattcgatgttaccgttagtccaatgaacggtagtattactaaagttattttaacagacgaaggcgttactgttgaaagttacaatcaattaacccttcaatagtatcaaaacgataattgatgtatgaatattcattgaatatagagctgggcaatattattctgattgttcagctttttttgtgggcaataattcatgccgttcaataataatacgcgcttcaaatgacagtttcggcagtcttctttggctttttttgtaggtaaaatgctcaccacaattgtagctaagcaagttaaaaactaatccagcgtggtatacgcctcttaatgacatcagtgtaacaagtagcgtctagagaaacaacttcgacctcatctaaaaagagccccctttaatctcgaagttcagattaaagggggcttttttagactgattcctatgttttaaactgtttcaaccatctactatttaacttccttcaacacaattcctttgtagagccatgtagtgagcaagtagtagattgcgtagagaataatgaaaattgaaaatggaatccagagatcattatatggatcaatcataatcaatttgaacaattgaagaccaaagaggacatggatgacgccgacgatacctggtaagaggaataagaccccaatttctttggcaatggattgttgcaatagattgcgacgcgtcccgattttagccaacattgtgtagcgtttaacatcactagctgccccagataaaatcttgaacatcaagcaacttgctaacatcgctaagaatgcaatcccgaggaagaagcccataaattcgagcccactgaacatgctgttcgctagcttatagttagcatacttgctactatccattgtagccccttgacctttagccaattcaggatttgcaatcacttgttgtgcgtgaatttttttgataacgggtaaattaaccgcaaagtctttgacccgatatgttttaacttgcgtggttgcgcctgccacttgattaaattcagcgtcagagacgactttaacgtccttactagattgacttggcacttgaattgcgcgcaaggatgaagaatcgccgttttgaatctcactgagtttcaccggtttaaccccttttgcgcgggcgacaccattcccattaccaaactgaatggccatgattggtgacttttcaagttgtgctgtccgatagtagacagttttcgcatcttctttaacatcgtaattagcagtcgccttcacaccctttaaatcttttgtgaggcgcaatgcttcttggttcggttgatttaaaacaacgtcgtaaggcgccattgtttctgccatttctggaatttcactttgatagccaatcccaactgtaattgcgcctagtgccaatgcaaataacatcgccaccaatgcgagcatcttggtgtaatccttaatgcggaagctcaattgcgctaacgtaaaattatttaaaccacgattacgaatcttgctgttacgtttgagcaacgtaatcaaccagccgaaaagggcattaaacaagaagtacgtcccgagcacaattgtcactaatgccacaactaagcccataatttggaacgttgcgactttaatcatcatatagtaaccaacagctaagaaaagtaagcccaagacaatttgtacaatacggcttaatttattttgtgaaacgcgatttggttgttgatcatcgtgtaagagttgtaaaactggtgttttcaaaagttggaattgattaactaccgctgcaataatgaacaagataatgaagaaaatcaaagttactaacactgcaggtaagtaaaatggtgaaaaatgcttaatctgaatatccatttgagacaataacagattgctaacaatttgggttaatccgaccccgagcgccgttccactgagagtagcagctgtcccaatcactaatatttcagcagcaattagttgggcaattttgcggccttttgcgccgagcatcataaacatcccgtaatctcgacgccgcatgctcattaagaaattattcgcataaataatgtagactaatgtgataatccctaataaaacagacccgatttggaaaataatgcccgccatgctaattggcgagttactcgtaacgaaacttttgttagttgccagtgcttcgaacatgtaaaaaatggcacttgccataattagaccggaaaaaagcactaaatagtctttcaaacggcctttaatgccggttaatgataacttcaataacatatttagacttcctcctaatggttaaatgtgcctaatgtatctaaaatttcttgataaaaggcttcccgactcttatcgccgtgaacgagttcttggccgatttgaccatctttaataaacaagattcgttgacaataactagctgaaaatggatcatgcgttaccaataagattgaaacgcgttgttcttcgttcagctgagccattgtatccaataattccttggcactctttgaatcaagcgcacccgttggttcgtctccgaataaaatagctggattatggactaaagcccgcgcagcggcgacccgttgtttttgaccacctgataattcggttggatatttgtttaataaactatcgattgataacgtcttggcaattgatgtgactaaatcgcggacttttttaccgccaacattttgtaacgtcaatggtaatgccatattttcataggccgttaagttttctaataagttgaagtcttggaacatgaacccaatttccttggcacgaaaatcagctaattcattccctttcaacccattaattgcttgcccgttaatttcaacttggccagcagtcggtttgtcaagggttgataaaatgttcaataaggtggttttccctgaaccagaagcccccatgatcccgacaaattcgccctgtttcacatcaaaagtaacgccttttaaggctgtgtattgcttttcgtttggtttaccgtatgtttttttaacgtctttgacgctaacgactgttggtgtgtccattaataatgcctccaaattttatgataattctatcttataagatattaaaacggcatgcgcgctttttagatgacattttaacgggctaaaataacaattttgtaagattattcccccgttctttaaaaatcaatgtgaaacagtcaaaaaagttttgtcttccctttctgatttgactataataaaaacattgtgaattttcagaaaaggggtttctttacgatggatgaaatagaaccaaaaaagaaatatattacctggcaagtccttgctttaatggattttgtgaccgtcattggatttgacgatattatttataactttcaaaaccaagggatggcagttgtcttctcatggattgtcttactattcgcctatgtcctcccttatgaattaatggttggtcacttaggctctgctttcagtaaagacggtggcggtctttccagttggatgcgccatacaagcggtgatgtttggggttacttaaccgcttggtgttactgggtagcgagtttgccatacttggtcgatgttgctaattcaatggtcgtttccttcttttggattattactgggaacggaaatcttgaagacaagctctcacgggcttcctttgcgcttttaacagccgcaattaccatcctcttcatcttcttccaacacaagtttacatcgtctctacaggtactcagtatcgttggtgggggggcgatgtttgtcatgaccatcctctttgtcctaatgacctttgttggtttattgaacggtggtcacgttgccacccatccattaaacgcacacaccttcattccaaaatttgatttacattacttctcaaccatcggcctcttaattttcgccatgaacggtgccgaacttgttgcaccatacgttggccaaatgaaagatggtaaaaaagattttccaaaagccatgatggccctcgctctaatgaccgccttcctaaccatcttcggctcattagcaatcggcgtcttcttcgatgccaaccacttaccagctgacttgaagatgaacggttcatactacgccttcttagcccttgggcaacaattccacatgggtaaagtcttactctacatcttcgctgttacccaagcgatttacatgggcgctcaattagcgatgctactcgatggcggcacacggattttcttatccgacactgccaaacaattcttaccaaaagcactgactaagaccaataaacaaggccttccaatcaacggttactggttgaccactgggatttgtgcctttgttttagcatctagtgcctttcttcccgagattaacgacatcttcaattggttgttaaatattaacggtatcgtctcaccatttgtaacttgtttcatctttgtcgccttcttacgggtccgtttcaatagtgaaaaattcccatcagaatacacatacattaaaaacaaaccatgggccatcatcgttggcttctggtgtttagccattacagcattaggaacgatcttcagtatcttcccacaagatgccacacctggcacagccaaatatacacacgaattaatcttaaacatcgtcgtctcagtcgccttaatgggcctcggcgtgattttaccactggttgcaaaattccaaagaaaacgagcagcctaactaaaaaaagattcgccccatatgggcgaatctttttttattgcctgggaaatgttaataaatcataaagccatctggttcaatgatggtcgctgctgtttgctgctgaaccccttcagacagaattggtgtcctcattgatgcaacactaacggctgtttgacctgcattaaaaacagccgtcaattgttgctcacctaatcgccgagtcatttttaagacgtcgggatgagtcggctcaattaaccactcaagctgtccttccgacaatagtttttgtttaccatggcgaagcccaattagctgcttaacgaactgatacatggcttgatcttggtccacgggatcccacaccatgcatttacgattagcaggatcgtccactcccgtcatgccatactcatctccataatagaggcatggcacacccggctgtagatacataaaagccatcgtttgacgcatcaagcgtcgattgtcgttggccatcgttagcaaccgcggcgtatcgtgcgaatctaggatattaaactgcacctgattaatttgatcccggtacagcattaactgtcgattcagcttcgaaaccatttggtggagcggaatttttttatgaataaaataatccaaaatcgcatcagtgtaggcgtaattcatgactgcactaaactcgtcaccgctgagccaactctgcgctgaatgccaaatttcaccaagaatatagaaatcaggtttagcagcatcacacacctgtcggaactttttccaaaagtgatgatcaacttcattggcgacatctaaccgccaagcatcaatatcaaatgcttcaatccaataccgcgctatcgataacaaataagcttgcacctctggattagccgtatttaattttggcatgtgtggcgtcgtggcaaagacatcatatgtaatgtctgtagcatcttcgaaattccgacctggctgataacgcactggaaaatcccgaatatggaaccaatcagcataccttgaagccgcgccattttgaatcacatcttgccattgtggtgattgatcgccgagatggttgaagacagcatctagcatgaccttaatccctctttgatgacaagcagtaatcagctgccgtagcgtctcgtcattgccaaaatgtggatcaaccatccgataatcacgcgtatcatatttatgatttgaaggcgccatgaaaattggattgagatacaatccattaatccctaacgccaccaaatgatctaaatggtcaataaccccttgtaaatcaccgccatagaaatcttgagcctgtggtgcctcatttgtccacggtaatgttccatctggatcatttgtcggatcaccatttgcaaatcgttcaggaaaaacctgataccaaaccgtttgtttgacccactctggtaccttagcccgatcaatttcttggaaatagggcatccgaaaacaagcatctgttttaggtaagattggaccaggcccctgatcaccataaaaagtgctggtcccgtccacaccaatcacttgaaaagcataggctaatcggcggcgatcaatggtcagttcaatcgtccaaaaacaagcgagatccgttattaagccttgctgcatccgaatcgttttcggttgccaactgccatcgactaatatataaggatccccatacactaggtacactgcttcaacgtcattacttgccgtccgcaatcgtacccgtagcctatctggctgatataagaaagcaaactcactatctggtcgatgataaatcgctgctaaatccatttgtctcctccttaaaaaaaccagtccaacacacacccgaaggctcggttgcactgattaattagtgttgatactgttcaaaggcttgttctaacaaatcagccgttaacgccgccgttgtagggacaacaaccgccgctgctgataattcgctcgcatgaccaatcgcaaccgaaacagcgcctgcagcattaatggcggccacaccagctactgaatcttctaatccaacgcattttcgcggattaacagcaatcttctgagcagctgcgatgaagatatccggggctggtttaccttggtgcacgtcattcggattaacaatcgctgtaaaatatgctgataaagctaatcgatcaagaatgagtggcgcatttttgctagcagaagcaatgaccattggcaccccgcgcgcttttaatgctactaacaacggttgaatacccggtaaaatatcggcagccgttaattgcttgatagcagccacgtaattttcatttttttgagtcgccagtgctgcgagttgtgccaccgtatactggccatcaagttgggcaaaggccacaattcgttgcaaggatgcttcccgactaatcccttttaactcagcttcaaagctatctggtaagctgacgccaaacgcttgttgcgccaattgacgccacgccgcaaaatgaaatcgggctgtatccgtaataaccccatctaaatcgaataagacaccgtccataataacctcctattccaacatcatcgacgcatcattgacttgaattgccaaacgatcgcccttgagtagtttgatatcagttcggtcggccgtcacgctaattttcaacaaccggccgcggaagttaatatggaattcataagccgtccattttttgggtagaaatggtttgaatgataattgtccttcatcgctaattcgcatgcctgcaaaaccttgcacaatcgctaaccaactccccgtcatcgacgtaatgtgcaatccgtcatcggtatcattattgtaattatcgagatccaggcgtgccgtccgcgcgtacatttccaccgctttatcttcgtaatgcagatcagccgctagaatcgcatggaccgccgctgataaacttgattcatgaaccgtcaacgtttcatagaaatcaaaattacgcttcttttcagcagctgaaaaacgatccataaaataccaaatgccttgtagaacatcggcttgtttaatgtacggcgaacgcaaaatcttatcccatgaccaatgttggttgatgggccgttgatctgctgggattgcactgacaggctggatatctttatctaaaaagccatcttgttgaagaaagatcccgagttgttcatcttgtggcaggtacattttttcaataatcgcttgccattgtgagagttcttcatctgaaagtctcagatccgcttttttggtatcgcttacttttttgagcgtttcaatcgtataactaagcgtccattgcgccaataaattcgtataccagttattgttaatattgttttcatattcattaggccctgtcacaccgtggatcatataccgctgcgcacgttgtgagaaatggacacggtctgcccaaaagcgtgcaatctcagttaacacttcgataccttcattgagcaaataagtctcatcgccggtgtaacgtgtgtagttataaattgcataggcgattgtgccattgcgatggatttcttcaaatgtaatttcccattcattatggttctcaatcccattaaaggtcaccattggatagagcgcgccttttaacccctgttgccgggcattgtgttctgcacccgacaattgattatgccgatacttcaatagattcaacgacactttcggatcagccaatgagagataaagcggcattgcaaaaccttccgtgtcccagtaagttgcaccaccgtatttttcgccagtgaatcctttaggaccgatatttagacgctcatcttcaccataaaaggttgaaaaaagttgaaataaattaaagcgaatcccctgttgggcactatcatcaccgacaatcaccacgtccgccatctgccaccgtttcgcccattgattcgtctgtgccgctaataattgctggtaactttgttgcgcaacgacctgcttgatacgttgcatatttggtaccaagtccaactctgaataatctcgagaagtcaccactaccgctcgtttttcaaaattcaattgcgttttaggggccaattgctgtttaaaacgttgcccaacttggtgggcttcttgaagcccagtatctgccatcattgtcgtttgatgatcaatttgaacccccacactaaaccgtggtaccccgaaatcgttgggcattgtttttccgaccaaataagtgtcatccgcagcgtctgactgctcaatcacttgccagaattgctcaccgtaattcgcatcctcattttgaacatcagcatcgatcatagaactaatctcaatctcaactgcttcactcgccaagttttcaacagtgtagcgcaatgcgcataattccttttgaacgatactaacaaaccgctctatcgtaacttgcacttgtttattatttttagtaacgatgaattggcgggttaacaccccattatgcatgtcgagtgccaatttaaatgcggtcacttcatctttgcctaaatccaccgcttgaccatcaattttaagattcgttttgatgaaattgatggcattgatcactttcccaaaatagtcaggataaccatttttccaccagccaacgacggttttatccggataccagacaccaccgagataaatgccaggcaggctgtctcctgaataatcctcttcgaatacgccgcgcatccccatgtaaccattaccgatactcgtcatactctcttgtagccgtttatgtttacgatctagttgatgcgtgacaatctgccacggatcgacttcaaaaattctctccatttcgttccctccgatacgtcagccaaaattattccgcctatttagcagcgcttaatagattgtttcttccgttgcgatgtcgaagtagtgcgctttagacatttcaagcgccatctcaacccgatcaccaggttcatgataatcccgcgaattaacttcagcgataaaatcgatttgtccaatctttgaatagagcattgtgttagcccctaataactcggaaacgacaacctctgccgttattttagcatctggaaatgtttggagggcaatttcttcagcgtgaatatcttccggccgaatccccaagatcacttgttgaccatcgtagccaccggcaatgagctgtttcaactgaccttctggcactgtgatatttagaccatcgtcatttactagatgcccattagttaaggttaccgtgaagaaattcgttgctggtgaaccgataaagcctgccacaaacttattaaccggatgattatagagttcagttggcttgccgacttgctggattttaccatcgttcatgatgacaatccgatcagccatcgtcatcgcttcaacttgatcatgcgtcacatagatgaaattacgacctaagcgttgatgtaattgcgcaatttcagtccgcatttgcacccgtaacttggcatccaagttcgataatggttcatccaataagaacaacttagcatcacgaacaattgctcgtcctaaagctactcgttgccgttgcccaccagaaagagaagatggcttccgatctaaatactccgataaacctaagatttctgctgcggcatcaacccgttttttggtatcttgcttatcattcttacgaatattaaggccaaacgccatgttatcgaagactgtcatatggggatagagcgcatagttttggaaaaccatcgagatatctcgatccttaggtgcaaccttgttcatcactcggtcgcccattttaaattccccatcagagatatcttctaaacctgcaatcattcgtaaagttgtcgatttaccacagcctgatggcccaacaaatacgatgaattcaccgtctgcaattttcaaattgaaatctgtgacagaattggtatcatttcctgaatattttttattgatatgatttaaattaatttcgaccatcgatcatttctcccttacttcgtttttaactggtgcaccgttcaataattgatagctaatgaaggctgccaacgaaacgctcgcaacaagaatcataaacgcgagttttaaaaagatattaatgcccatcaacaagatgaaaacgccggtggctagcactaatttgcccccattggcaatgataaagccgcctaaggtaacatcatggcgcactaacccgaccaagtagcttctggcaacgacaactagcaataacgccccaaaccagaccaataagccgctacgaactaaaatatcgcctacactggcttttagtaacaacacgatgatcatcaatgccgtcgctaacgtcagattcactaaaaagtctggcagtgcctgccgccacccttttaacacaacgcgtgcataattaccatcaccgttaacttgccattggtccaccgctctaaaaaccgcgactaaacttggtagtgtaaacaaactgagcattaacactagcacaactgcaccgggaatcattactcggccgtttggcatactaaacgttaaaatcagtgtcagaatgacaggaaaattaattccaaaccaagcaaggttgatggtaaaaagcgaccataaccaattcccggctgccaataacgtttgtcttgtttcgctgtgctttttcacgatcaacacttccttaattatttaacggcgccatctgtaacacctttgataatccatttttgagcgaataagtagaagacaatgaccggaataatcgacaaggtaatgccggctaatgcgaggtgccattgtttcgtgtattctccgaagaaattaaacatttgtagtggaatcgtatattgcacttgtggtaagaccaatgatggtaaaagataatcgttccagatcgcaatgatgttcaaaatagcgaccgtcacagtcattggactcaacattggtaagatgatcttgtaataaatttgccaccgactggcaccttccatttcagccgcctcatccattgcaatcggaatacttgaaagggtgccttgatataggaaaatcgataaactacagttgaagcctaaatacatgaacatcaagccgtacatattcaacagatgcacattaccgaagtttgccgtcaacggaatcataactgattggaatggaatcaacatcgctgagatgaaaagcagcaataaactgctactcaacttcgatttattccgttgcagtgcataggctgccattgaagaacagaggataatcagcaacacactgcagactgtaataatgagcgaattggtcaatgaactaatgaaattcaatgctttaaacgaatctccatagttcacattcgtgaatggattaggcagcgacaatactgaggcaaaaatgccttttggtgttttaaatgagttcgttagaatcatatagaatgggaataaccataaaagaccaatcaatacaccgaggacgccgatccaactatttcttttcttattcattagaaatcgccctcccgtttacggttataaaagacttgtactaaagaaatcgcagcgacaatcaagaagaagaccattgctttagcttcagcgagtgcgaaatcactcgaattataggctgtattcacaatatccatcgccaacatttgggtcgagttgtaaggtcccccgttggtcaacgacaagttttgatcgtagattttaaacccattcgacagagttaaaaacatacagacggtaaatgctggcgcgatcattgggaatgtaatccgcgtaaatcgttgccaagcagatgcaccatcaatttcagcagcttcaatcacttcacttggaatattttgcaagtaagcaatatagataatcatgatgtaaccactcatttgccaaaccgtcacaattaccaagccccaaaaaccggttagtgaattcgttaaccagttttggaagacagtcatgtgtaaggcagatcccaaagcgctaaagccttgcgtgaaaatgaattgccagataaatcctaagattaacccaccaatcatgtttggcataaagaagatcgctcgtaaaaaattgttgcctttaaatttctgtgtcacaagtaatgctaaccccaagccaattacatttagcaagatgacggtcacgataacaaaagctaccgtgaaccaaaaggcgtttccgaatgctttatcttgtaataaggccatgtagtttttaaacccaacgaccttagtaaaagagagtccatcccagtcagtgaatgaatagaataggccctccagcattggaatgaaaacgactaatgctaatgcaacaagggtaggggttaaaaataaccaaaatgataaactcttatttttcatttcaataccctctttttgttttatccaattgaataaatttatttagtttgttgttttgtccaaccgtccttcatatttgaaacagtcttttgccaatcttggtcacctgataaatatttttgtaggttaggttgggcaacgtctggatcccatgatgtgccagtataacccgggaaaacccagccgaatgttgctttcttttgactgtaatcatagaccgattgtgtgagtgcatctggcatcttcacatcaccgtaacctttataagcaggtacgaaatgtaatttctcaacaacgtcttttttaccttctttagacgtatatagccagttcaagaagtccttagctgctttttgttcgtcggtactcttccgtttattaactgcccagtagattgaggtcccaacaggcatcttaccttgttgttccttaactggcattggaatcatgccgatcccgtcttgagcgaatttcgcatcaatttggttaacggtttcgtaaatccagtcgccttgttgaatcatcgcaacttttccttgagcaaagttttggttcacttgtcccgcgtaatccatttgcatgactggttgaacggaatattctttttgcaaatcaatcatttgtttcatttctgcattgttttcaaacttcattttctttgaggtatacaatttttgtgcattgccatcaaattctttacttagataaacattcaacaaatgatctgaaagaatccatgattccttaccaggtaaagcaaagacccctttaatgcctaattgttctttttgttcatttaatgttttaacagctgcttctaatttatcgtaagtcgttaagctctttggatcgataccggctttttcgaagacagctttattataaacaaaaccatagccttcaatgttaaatggcaagccgtaaactttcccttgtgacttaacagtatctagtgtgcttggaatagcggccttagcagcttttgtatccgttaaatcagccgtgtagttcttgaattgtttaaccgatgctggcccatctaaactaaaaatagtaggtgcattcccggatgaaattctcgtcttcaaaacgggattatactgtgtcccaccaccgattgatgtgatttcaatcttgacgtttggatgtgctttttcatacttcttcgcaatcgctttgaattgcttgttggattccacttttccttgtagaattgtgattttcacattgccgccatccgcactcttgctcccacaagcagccaatgttaacgttacaccagccaataacgaaactaaccctagctttttccacatctttttcactataacgacctccaataaatttttatcagtgctgtttacaagttttattgtcgtactttgaaagcgcttttgcaaatgttttcctgatgttaccggtaacagttttcttatgcttattccgattgttcttttagcacagggcgaattgtcccgcccatttcaatgtttggttcgaatatcaatggtcgctcaatccactcctgattaattttcttgaggatattctctccgcatgcacggcccatttcaatgatggactgcttaatcgttgtcaacttaggagaggcaacttgatttaaaaagaccccatcaaatcctgtaatcccaaactctttcggcacatgaccaccacacgacgcaatcccccgttcaatcccaattgccagacgatccgtggcacaaataaacgcagtctcgagtttgaattgcgcccagtgttcaatgatgtaggcttcggtcaaatgactatggttgttaaaatggtgtaactgaacaggacgctgctgctcatgcattaattgtaaataaccggcttcacgtgatttttcaaacgcttcttcactcgccattccaatataaataagctggcgataaccacgctctaatgctaattgcgctgcaaggtaggtccccaactggttatttgtatccacataatcaaaaccgtactgattctccccaaaaacgacgactggctttgtcagatcgcgaatccatgcaacatccctttcacgcaatcccgtaataatgtagccatcacaattcccgatatcaaagttacgccgagttactaactgcagcgaatactgatgtaggtcaagtgccttagcaattccgaccattagattcatgtaatatggttcggtaacgtcgatgtcttccaagatacacaatttgatgattcgggtactgttgctgactagggctttggcaattaaattgggacggtaatccaattccttcattgcggcatacaccaattccttcaattcatctgttacttgttccggatgattaatcacccgcgaaactgtcatcttagaaacgtttgcccgcttagcgacgtccattaatgttgccatttctccaccccttaagttcaactttttatattctttcacaattataccaatttatgcataaaatgattacgatttaccttattggtattaaaaaagcccatcatctaaagatgatgggctttcccttttttattctataattgtttgatttatctgccgtaagtgctccaagtccgttgctttgatgccagtatgcttagtaatatctttttttagcgctttgtacttgcggaggccttcttcagttgcttctaaccaaacattccgttggtcattttccatatcacgaattttgcgaataaactttttactttgtagcgtattgattttacgggaagccgctggtgcggaggtcccaaatacgactgcaatttggcctggggtgttccgtcctagttccacaatctgttccaacacgagaaattgatcataacttaagccatgtttttcgctcattttattcaattgagtcgtgatgttctgacactccagataccactcactaattgttaatattcttttattatctggcatctgcaaccctccaccgttcattcaatatagttttaacttatgtacaataaatgaccaccggctagtcaaaagccgacaatcatttatttaaaacaaactagcggctcatttcaacttgattaagcagcagttaaggttagtttatatcattgtttggttatgtgcaagtatatttcacgcgacgataattgccaatcgttcattaaaaaccttttaaaaccaatgtttgagcgatgtttttcggattattttaatttgtagataaatttacgaattttctgaaaacgccaataagaacctttgatgcgaaggggtcacaactcatgagttatgacctagtttatttttataaaaatcaacaattaatgccgataattcatttgcgcaactattttatttttcgtctatccgttgctacaattggtttttggccacaaaaaaaacgaagttcagttaattcacgaacttcgttttttgtgttaaacgactggatatttattttttaaatagtaataaaagggcaatccgagtaatgtaattccgattccgattaaagttaacatcgtctgtgtgaataatgtattcaccacgatgaaaatcccaccaagaatggcgatgactggaatcactggataaccaagtgtgcgatacggacggtttaattctggttcacgtttgcgcagaatgaacacagcgataaacgttagaatatagaaaatccagatgacaacaaccaacatatcagtcaatgtattgaagccacccataaacatcataacgatggcgatactaatttgaactaaaccactgacaaccggcgcgcctgttttagaaagggagcgcagttgtcgactgaatggtaaccgattctcgagcgccatcgcataaggaatccgcatcccagtcatcgtgtagccgttaatcccgccatagacggaaattaaaatccccatagtgatgattttaccacccacaccaccaaatagcactcgagccacttctgaagccgcattcggattgccggcaatctgattgattggcaacacaagaacgaagacggcgctcactaagaggtagacaaccatggttcctgttaaaccaattaaaattgaccgcggcaaatcgcgttccggatgcttcaattcacccgcaatattcccaacgtgaatccagccatcatacgcaaagagggttgctagaacaccactgcccagcgctgacaggaaactccccgatccatttgaccgggtcacgtcaaataatgacacatgaacggcgttgctgcctggatgaattaacccgaacacaataataatcgcaagcgggattaatttaaagacggttgtgaaggattggaatagtcccccaacccgggaaccaaagaaattcaagattgttaagctgagtccgacaatgattgcaattggaatctgccagtgagctgaccaactgaataagttaatgcattgcgttgcaaaaacaatcgacaacgccgcaatgttcgctggaaagtagactgttgtttcggcccaacctaataaaaatgccgctaaactaccataagtatggtcgatgtaccgcatcatcccgccagtttctggaatcgcagctgctaattcagcagctgtcaatccagcacaaattgtgattaagccgccgacaagccatgcaagcattgtcagcccggtggagccggtcgcatgcgtcacaggatccgctttaaagaacacaccagcaccgatgaccgttcccatcacagtggctaatgccgcggtaaatccaatcgtttgatttaatgcttgtttttccgtgggcatcttaaccgcctcctaatatcatttataatatttattatgacatgttgaaagcggtctttactagtctaatttgcaactaaattcggatatgtgcggcggaaatcttccattgcaccaatcaagttcgcatcattatgatactgacacgtccgaatggttggcatgaaaggcgcaatatcgacttgcttgagtatttcctgtaaagctttttcaatatttggcaccaagaaatcggcctgcgacaccccaccacctaaaataaccgcttctgaatcaaaactatattgtaaattatagatggcttgtgcgagattatcatagagcacctgtgcctccttttgcgcgagtaaatcgccttgatcagccaattcaaaaacttcatgccctgagtagttagtatgtgcctcttgattataacggtcagccatgtgaacggcggtcccgacttcacttaaaatccgaccatcattcatcatcatgtagccaaactcaccaccgaataaatggcgaccatgttggacttgtccgttgacaatcactgaaccaccaacgccagtgccaattaccatgaacaacacattttttagccctttagcagccccactaccgacttcggctaaagccgcgcaattcgcatcattttccattacgactggtaagtcaaaacgcgtttcaagttcatcttgaatttcaaaatgatgaatataagggagcgcactggccccttcaataatacccgtcgccttgttcactgcacccggcgtactcattgcgaccccaacaacttggtcactagccttaaactccgccacaatctgcgtcagcacatcataatacgcattcaacgactttggtgtggcaacagccccttgtttggtcaattgttgcgccgcaccatcccataaaccatatttaatcgtagtgccaccaacatcaagtaatgctaaatttttcattcgtcaatcccccaatcgattctcttatgtattttgataaccgcttacattctaccataaaattacgctgggcacccacaacagtgttaattattggcgtacacgctaaaggcgaactttggtttttaatggctttcatggtacacttaacggataaggtgggtaaccacccatttcacatcaaaggagcgtcaacaacatgtcaactaacgtttgtttaatcgcaatcacaattgaataatcatgtggccattttgcggctatttctgttggcattcgctttttaaatttaattaactgagggctgtgacaaaagaatatttttgccatggccctttttttcaattgaaacgtgctccaccaggcatctgctctcggttagctacgtcagccaaataaccaacaaatcggtttttcgtctgcctatgctaatcctcagcagataaccgccggtgccacactcttatcttaaacgtgctttcttcaaatagtcgtctgcgtttagcgccatctcgtaaacaatcggcgttgccgctcatttacgagatattgctaatcctcaacggctgaccatttgaagacgcactctcacaaaaaggagatctcatggaagaaacttatatgcaacctaaaaaggttttaatcactggtgttagtcaacgccaagttaattttgactatacaatgcgcgaactgggcgaactagcccgtgccgataacttagaagtcgttggtgacgttcgccaaaatatcgaccaagctaatcacgccacttattttggtaaagggaaggttcaagaaattaaagaacgcgccgtcgctgaagatgcagacattatcttgattaacgatgaactttcaccttcacagattcggaatttagaaaaagaactcggaataagcattcttgatcggacgcaattaattcttgaaatctttgctagccgtgccaaaacaaaagaagcgcaactccaagtggccatcgccgaagcgaaataccaattaccacgcctccatccttctgaaaacaagttggatcaacaaggtggcgggggtactgcgaaccgtggggcgggtgaaacccaacttgaattggatcgccgactcatcgaaaaacggattacgaagctcaaagccgaacttgctaaaatcgatcaacaacaactcgtacaacgccgtcaacggacgaaaaatgcgattccagttgtcgcactcgtcgggtacaccaatgcaggtaaatcaacgactatgaatcgaattttacaacggttgaaccccgatacacctgaaaaacaagtttttgaaaaggatatgctctttgccaccttagacacgagtgtccgcgaaatcgtcctccccaaccaacagaaattcctgttgagtgatacggttggtttcgtcacaaaacttcctcatcacttaattcaagcctttaaatcaaccttagctgaagcagcgagtgctgatcttttaatccacgtggttgattactcagatccaaactacttggacatgatggaaacgacacaagaaacccttgaatcactcaacattaaagatatcccagtcatcgaggcttacaataaagctgatttgaaaccagatacgcgctatcctgaagtagacggaaaccaaatcgtttattcagctcgcgacgaagtagcaatcgatgcattgattgccttaattaacaaacaactctttgaacaatacccaacgctcgacttcttagtcccatacacagaagggcaagctgtttcgtacctcagtgatcgtgccaatatcactaaacaaagctatgaagaagatggcacgttgattcgtgcacaaatcaacccagacctattaggacccgttaaaaagttcgttcaagcatagccaagcgctactttgcggcaaacaaaaaagcccatcgacataaatgtcgatgggcttttttcaatttcttattgatactttctgaaaaccttatctgaagctgcttttaagctttgaatttcttttgaatcaatatttattgttagctgtgtagactcttgagcataagccgctgcaatctcttgcaaaccaactaatgctttccgactgagcgtcacatagctttgtggaatctcattatcctgaacgaataataataaacctgcagcttttaaacggtcgatatcattttctgaaaccccgattgaatgaagggtttccaaatctgcgcgttaatcatcggctagttgcttaattcgttgtaatagcgcggcttcatcaagattaaactcaactttttcgcaaatcatatctagcgtttcaaaatattgcatgctagcaacactagcgtgcaatgtattgataatttcatcgactgttttttctggttttaaataataaatcgtcattttattgtacccactatttttattaggattaaaacacttacttgattgccttaattctataacatttgtggatgaataaaatgcgtatattttaaatagtttaaaaatccggcgaaagataaattaaaaattttacccgtattgtcaatctaagtgcaacagtttctagtctaatcctataagtggtacacagcttagagttccggcatcagttccgccgcactccggtagcccaagatacgacgaggccggctgttgagtgcgtcctggaagctctgaatatcaatgatgtcgtaatggtggagtgagcgacctttcggaataaactctcgtagaaggccgttctggttctcatttgttccgcgctcccatggtgagtacggatgagcaaagtagacatcagttccttctactgaatctagttgtgcgaactcactgccgttatcaaaggtgatggtggtgaagtattccgcaccgtaatcatcaatgatggactgaagtcccaccttacaggtacttgctttgtagttagcgagcttgatgatgatttcgaagcgactcatccgctctgtcaaaaccagcaacgcaggttcgctatcaacgcgcttacctttcactaaatctccttcccaatggcccccttgccgacggtcttgaacttcaatgggtctttcatcaatcgaggtaccaagcttcgtcttattggtgcgggtatgggaatggcttcgtttaattcgcaagctgggtttgcgcggtaagtcgtgggtccgtagttcgaatctaccggcctcaatatcccggtaaaccgttggtgttgaaggaacaacctcgtctgcgtgttcccgtttgaaggtgtgcacgaagctgtccacactgtgtacgcgtggacgttgcttgatggcagcggcacaggcggcgtagaactcggggttcttctcaagcatcgtcttggggcgacaccactcccgccgctgagcgtgcagataagctgccgtatcagcaaagtaaatcaacgctaccttatgcccgggaattcgctgtagaacggagccacgagtgatctcacgcgaaatagtactacgagagcggttgagttcgcgggcaatccgtgcttgggagaatccctgattgagcagagtttcaatgcgaacgcgatcaaaatttgatagttgttggtaagccttagagatggtacgcttgatgttggtcatgatgtgcctttcttatgtgcttggttgcttataagaataggtcatcatggcctttttggtctatttaattatgtgttgcacttagattgtaaacgcgggtcttgaatataaaatttcagcttttatgttacaattgaagataaccattttagaaggagaagttgcctagcatgaatacatcattaacacagacaacaagtctcaaaccagttacaaaatgggtaggtggaaagagacaattactaccccagcttcaacaatttaaacccaaaaattataacacttattttgaaccatttattggtgggggtgcattactattttccttacaaccacagaatgctgtaataaatgatgctaattcctctctaataaatatgtatcaggttattaaaaaaaagccagaagaattattgaaaattttggaaaaacacgcagaaaataatagtaaagaatattacttagatattcgaagtaccgatcgtgatggcagaatcgaaaaaatgagtaatgtggaaaaagctgcacgtttattgtatatgctaagagttgattttaacgggctctaccgtgtcaataaaaaaggacagtttaatgttccttatggtagaaataaaaatcctaaaattgctaatcatgaaaatattatgtctgtaagtaattattttaactcttgcaacattaattttttgaatgttgattttgaagaaagcgtacaagaagttcaagaaaatgattttgtatattttgatcctccatatattcctttatctttaactgctgatttcacttcatataccgaaggtgggttcacatttgacgatcaaaaaagattacgtgatgctttctttagattatcaagtattggagcacatgtaatgctcagtaattctgatacaccattgacacgagaactttatgccgaagcaaatattcatgaagtttctgcttcaagggctattaattcaaatgcgaaaaaacggggaaaaattggagaattgataatcaccaattattgattagttacaaattgttggaggcttaaattggaagaagtttatagtgactttatgagtagtttaataaaggctgacgcttttgaatacatgaaacacctaaaagataacaccatagatttgattattgccgatccaccctattttttgagtaataatggaatatcaaacagtggtggaaaaatggttagtgtaaataaaggtatttgggataagaatacggaagtaagccccgaagaattttatgatctttttttgagagaggcttaccgggttttgaagaaagacggtacactatgggtttttggtacaatgcacaatatttatctaattggatatttactgggaaaaaatgagtttaaacttctcaataatataacctggcaaaaatctaatccagttccaaacctaagctgccgtatgtttacacattctacggaaacaattttgtgggcaaaaaagaaaaaaggcaaacagttttttaattatcctttgatgcgtaaatttaacggtaacaaacaaatgaaagatgtttggacaacgcccactacaaatcgttctgaaaaaagatttggtaaacatcctactcaaaaacccttatcacttataaagcgtataatccaggcctcagcaaaacaagattatttaatacttgatccatttgttggtactggaactactgtggttgctggaaaaatgctggatataaaaactattgggatagataactcaaccgaatatttagaaatagcaaaacaacgtgttaaagattataaaaacgaaaaattaggaaaaataaaatgaattttaacgaatatatgtcttcatcaaatgaggaaaaatttaaatattttatgggaactagatttaaaactaatagaactcctagctattgggttaattggggaaatgttattaaaaatatcaaaccatatgaaattcaattaaatactttaaattatctgataggtaaacaagatattgtcggggaagctaaaagtttgtttacacaacaacctgctttattaacagcaataccagttttacttgctagtagagagctagatatagacgtattggctttcaaagatgatggagatatgtattcttacaatgttgattttcaaagtcctgatattaacgaattggataaatatataaattttatgattgaatctggattacttgaatttctaagaactggaattaaacgttcattagttgactatgtttatggagttcaggctggccttgatagcaatggaagaaaaaatcgcagtggcacagaaaatgaaaaaatactagagaaaaaccttattcagcttattaaggaatgtccaaattgcgtttatattactcaagctactgctaaaaaaattaaagatttatggaatgttgaagttcctgaagttctggctcctggaaagaaaggaggccgccgctatgacggagctgtattcaacaaaaatactaatgaagttactgttatagaaacaaacttttacggcggtggcggttccaaacttaaagctgtagctggtgaattcagcagcatttatgaaactagtataaaaaacgcaaaaaacgttgattttgtttggattagcgacggacctggctgggatactgctaaaaacccaatgagtgaagctttcgatgtaattcctaacatttttaatcttcaaatgataaaagatgattttttaaagagtctgattttaaaaaaattaagcgataatactggccattgcgagaattgcccgaattaaagccgcagcggccataaggatcataaccaagcaaagcggttagttcagcttgcaagattcgattaatagctgtttcgagttgttgacgaaaaagttctttaacatcgccatttgataatagagttttggttaaatctttggtaaactggtccatggggaatccctccgttttggtttggtttgacgatttaatcatacggggaagggattcccttttcaataggatttttattcatttacacaaactattttatactctctacatttgatcagtgataatcaaaatgtagaccgttctaagcaatttatggattgaagcaatggcaattttcttgaacccctttgttttaagggcggtagctgtcttttcccttgcgaggtgaggcccatgggaacatggaataatcttcaggaaggtttcacagtcaatgagcgtcttccagacactctcgttgatgttgctatttgcaatgtttattttagcgttgctaacgtacatcgacaaaaggaacaaataaaaaagccgccctgcgtaactttggccagttacagggtagcttaatgctgtcttattaacttcgccaccgcctttgaagcggcttgcatgggaagtcctgttctagcggggcttccctttttctgtctacattatagcatgactataatggcctttcgactattttaatcaactttctgccagtttttagggaacacacgtttgctttatatgctacaatacaggtaaaagctaacggaagtgatctaaatgttttttgatgatgaaccgcatggcgtgttcttcttaatcgataacaagtccttttatgctagttgcgaagccgttgcccggggccttaatcccttaaaagtcccgttagtggtccttagtgaagctgaaaataccaatggtgggcttattttagccacgtcacccgaagctaagcacttatttcatcttaaagccaatgtctcccgtaaacgtgacttacccactgactccaggttgtgggtcgtgccaccgcgtatgaacctttatattcaacgtaatttgcagatcaatcagatctttcatcaatttaccactgaaaaagaggtttggccgtattcgattgatgaaagtattcttgatatgacccatacttggcggctgtttggcaattccgttcgcgaagtggcgcgcttgattcaaaagacagttcggcaaaagctaggcttgtataccaccgtgggaattggtgacaatccggtgcaagctaaattagccttagacctttacgctaaacataatcatgaattgatcggtgaaatccattacgaaacggtgccggataagatttggtcaatcaacgaattaacggacgtttgggggattggcccccgtatggctaaacgtttgaaccggcttcaaattcacaatatgtatgagctagcccacaccaacccttatttactcaaacagcaacttggcgtcattggtggccaattatttgctacggcctggggaattgatcgcgcacaagtcacggaaccaactaaggttaaagaagctagcctgggtaattcgcaagtattgccacgagattattttaaccaagtcgaaattgaaaccgtcattaaagaaattgggggacaggtggcggcgcggcttcggcaccaccataaactggccggttgtctatcgctaagcattgggttttcctatgctgcagctgaagcagatggtcgcggtggttttaaccagactttaaaaattgaaccaactaatgacaatcaagttttgacgcaacaattattgtggttattccgtcagaattgggacggtcaagctgtccggaatattggcgtttatagcagtaaactaagtgccaactccggccaacaacttaatttatttgaaacaccgcgtaaccaaattcgccgtatccagttaaaccaggtgattgatgaaattcaccggcaatttgggttcaccaaactagtttacgcgactagtttattaaagggaggcaccgctatcaagcgggcttcactagtgggcggacataatggaggcaatagctatgaatagcgatatcgagattattaagggtcggttaaccttattgtttaagcggcgtccccaaacccgctattggttaatgttgactaatgacacctacgatcagacctataatttgtttttcaacagtcaacgggctaatgagcgcttgcaatccgttcccttgcataaattagctaactatgatttagctgatttagaaaagttactaaaagcattacgacaagatataaagctaacgatcgaatttgtcggctttacaggagatcggtggccagcaagtcaaaagctgattcaacgaaagcgggtgccccttgaataatcaagaatttgatttagccacggttaagcatttttttgaacatgattaccatgaccggggcatgatgaaatggcagggcttctatttatccgatcatactgccgcattaaacaaacagaaccagcagttgaatgcagtatacgttccacgaccgcaacaatccttagcaacaattaccgaggtattggcggacgcatatcagcgtcaacaaccagtgatcattcaactaaaaacggttgaccaaaacaaccgtcattggccagatatcaccaccttgattcatggttacaatgccaatgatattgtgattgacgctgatcggtttatcccactacaagacattcgcaatgtggcagacaaaaagacggagaagctataaaaaatagctatccgtccttttatattttgcctggttttttgtcacaatagatttattgtttaacatgtcttcttaattattgaacttctccaggcgatagagttgttcattgtcaagggaactattgccatttttaaagtgataacccattttttgataaaaacctaagccagtaattgaggccggaatctcaattcgcttggctcgtttaaagtattcgtcctgttccaatacatgaataagctgtttgccaatcccttgtccttgaaattcaggtgatacaaaaatattgaacaagctactttcgtcttgtttaccccaataagggccaattgatccgacagcaataatcttatttaaagtatcatcaacaaagacataacaatgaaagtattctgctctctctttaaaatcttgcgcggtaagatgttctaaatcattttctaaatatttattagaataatccttgatattagtagtgagcatcgtttctttaactaggttagcaacttcttcagcgtctgaatctttaaaaaagcgttttataatcatattgtttttccctcattaaaataattatctatagttgtctttgtttgacttcatcttgcaccggttgtttgatcttgggattttgtctaacgaaatcctgtaactgtttttgggtacgattactgatttcctggtgcacataatttagctgggtttttagttctgatttttgttgggaatcagttgcttgcttaattttttgttgcaaaccttgataggacttattaagatcctgggctgatagcttttttagatcatgctcaggttctttttgtgcttcttgtaagcctaattgtttggttaacccgtcactaagctcaatcactttgttgctaacttgctggatttcacttaaagcactatggatcacggctttatctttggcccaggtagctacatacccgagggagtaattgcctgtatcaaccccaatgttttgcatggcgacatatgcaaccgcttcggcttgggtttcctgataagctcgtggccgatctttaaaggctgattttaatccgtgtagctggctatgcgcatattcatgatataacgtcttcaattttaaagcattattgggctcatcgccaccaatgacgatttcattagtgctgggttgaaaataccccttagccccatttagcgtcgctaaaggcacttcactgactttaaggtcgggttgctggttgagatagtctttgaacgcgttatacaagttcgttacattctgatgatcggctaaattttctttgacaaaatccttggcacttaaaactggctcaccgctagtttgtgacacgtcaaagacgggtagataacggtaaccgacaatggcgcgttcatcggtggtatcaagacgcttttgctcggctggtgttaacttcttaataatcggggccgcaatccgaatcgcttttgcgcctcgtttgacggtgcggttaaaagctgtctgccattgcttaaagcccgcgacttgagtggcttgcggattttgcgcataaatcaaatcaatgtttctggcgctataatgatgaaatttagccagggtattaagatactgtttaaatcggtcactatcggttaattttaggatttgttgttcggcttgggcgactaattgtgctttccaggctttaacgtctgctttactcggcattgcctacccctcctcatcttcaaaaatatcattcaatataggggctacgttgatttgaatcggggtcgtgccataaagggcgatgtagccatcagctaatttttgccaagccacttgataataggctccgttaccagtggtttcttttaaatacttataggttcctttagcctgcaaaaccggtaattcactcccaatgactgttaattcgttatccatatttatgatctcctttgcgttgctaacctcacccgttgtttaggtttacttttagggttgtcaaagtgaacctaaatgacgggttcaccaaccggaacgtagtgtagggcggtagacaggatctaatcaaaatcaaaacttaatttatgaccgtcaagttttagcttggcgtcaaacgactttccttttttgctcttgaacccctttagtttgctggtttcccccttagtgattaaggctttgatcgcagttttaccgagggttttactgctccatttcttgggtaaggtaaagtcttcgccttgcttaggcttcacaatgtaaaacttctgtttatttaaaacggtcgcttgcggcgtttctaagaagacttcggcggctttttgcgcttgctgttggtgattgatttgttgcttaatggctgaactgccagtcaattgcgcgggaacctcagcaatcaacttggccacaaatttcttgatctggctcaaaaagttatccggggtgcgttcttcggtactgatttgttgtaacgcttgctcccattttgctgtcatctctgggctagttaacaagggttcgagttcaaccgctttacataaagtaattcccgcttcactgacgtggagcttgttcttttcagtaactaaatagccgcgcttctttaacacttccagcacatttgcccgggttgcactcgttccaatgccttgcacatctttaagaatcgcttgggcttcttcatcatcaagtgttttaccggccgtcttcattgccgtaattaaggtaccttcggtaaagggcaccggtggtgtcgtttctttttgcggtgtttgcagatttgctttaatctgatcgccttggtgaacgagcggtaaagttgctgcttcttgctggtcggctttgtgatcatcaaataaagcttgccagccttgcttagttgggaccttaccggttgctttaaaattggcgtcaccaacttgggtaataatggtggtttcctcgtactcgtacggatcagcaaacatcgctaacgtcgttcttaaaaccaaatcatagacctgttgctgtaatttaggcaagctggccagtttctctttcgtcggcacgactttagtcataataatggcgtagtgttcttcaacctttttcccattaacatagcgcttattcggggtggtattggttaaagcgactcgcttagagactaaccccagatacttcgtcagattagccactaaatactcaaattcttcattagtgatataagcacaatcagttcggggataactcaacaacttggcttcatataaactttgaatagccgctaaggtttggctggcactggcatgataccgtttattcatcgcactttgcagactggatagcgagaatagttggggactggcactctttttagcctgcttttgcacgtccttgattaaaccgtcccgtaatcctttctgaacgtgtttagcttgcatgaatgtcattagccctgtttcatctttaaaccgctgataggggtctaattttgcgacgaatttttgctgattaactaaaatttccgcatttagttcaaaatagggttccggcttaaagtttttgattgcctggtctctttgatagaccatatataaggttggcgtctgcacgcgaccaatcgaatacaccccgcgtaccccgttttgtcttaataacaaagtatataaaggactgccattcataccaattaaccagtcactaatttgacgggtttgggcttctttataagccaaatagtctttgtgccaatcaccaagatttttaaagccggtaataatcgcgtctttttctaggctattcaaccaaaggcgcttaatcgttttcgacttaacatcaatatgcgcttggttcatgatcgaccacgcgatatttgacccttctcgaccactatcggtggccacaataatggtatcggctttcgttaacaggtctttaacgatcttgaattgcgctcttttactagttgacacttcaaacttgtatttgtctgggaaaatcggtaaattagataaggcccattgctggtatttctgatcatatttatccggtgtggctagttcaactaaatgtccgagaccatacgtcacaagcgtattttcgggcaaaacagggtcactaaccgtatagtaaccctgtttttttgtgctcttttgaaaggcttggacgtatgaacgggcttgactgggtttttcagctaagataacagtggtcatgttcgttcactccttgtgattcaatttttgatctaattctgttttgccttgttcagctgcttttaaccaagttttacggcgcaattcttgttgctggtctatcgattgttgtttcaaatattgttgataccggttgatggctttgagatctgcaaaggctgcccagcgaaacaatagcccaccaagcagtaaaactaaggccattagcgctgttcctaaaaaatcggtatggctcgccgtgaaaaactcttggtataaatccattaacatgaggtaaattcccattaaatagaagatcacgctaactaagttatcaaaatagtaagacagtttagtccgccgggagggtgttgtaaaagggtcggttcgcatatcctttttggctttttccaataaccagtgtgcgatttttttcataactatttctccctcctagtggctacggaaataattttgaaacattctcatggcacccataccagcactcttagtcacaccggttgaagcccaaaagtctttaacggcgtcaggtgtcttgaccaccagaaaaccgaatccgattgaagcaataaaagcaataaacccgtatttagccatattagtgaaacaccatactgataatgacatacaaagcacctggctaataatggaggcattgtaataaatatacttcttccaccacgtgccactataatcaaagctttcagtcgccatgctcattgcagctaaaggaattgtcaggttataccaagccatatcagccacaaacacacacattttgataaagaacacgacggttacgacagtgaagattagtagaaataaaatctgtaagggtaacgaaatgccaacatcttttagcccagggactttattcatgccagtaattgatttagcggtgaacttttgatcagagctaaacatatactttagtaggggtagggtaattgacccttgaataaagccctgtaagaacacgaaaactggaatcacggccgctgatttaatcccatccatgatgatattagcccaagtgacatcggtgctttcgtccgcctcttttagaattgtcatcacaatgcggccaagtacgaccacaacgactaacgatgtcgcaaaggacaggaagatggcataccacgttttaacaattggcaagctttgattggcttggtcaatgattgccttacagatgttgaataagccgtccaacaaaccagacagtgcccattcaaaaaacttagcaatcgctccctgaaccagtcctgaaatatcacctaaaacaaacatatctatcacttccttttttgcaattcaaagcttcctaatccgtcatctgctttggcagttttatttattgctttagctttataaccatcgctaattttagttaattcaaatttttgattcttctcatcatcagtatttacttttaaatattctttaccagaagaattactgactgaataattggcatttacattcatcaaggggctttcaataatcattgtttttttattaaattgggttttgtagctttgtcctttttggttgagataccatttattactttgcaaatcttgtgctgtagactttccgcaggcggttagaccgacagcaatcagtaacactgtcatcacggcgattatatatttgcgatattttttcattaatatgccctccattatccaagtaagttgttgtcgtcttcttctggcgcctctgtttgactatctttatttgaaactctctctaaatcgctgtctaggttgtcctgttgttgctcctcctctttctgagacatcttgtttgcgacttctttttgagcagtctcctttaattttgctttccatttttctactttattcttaaagttggtttcttgactggcttctggttggccttgataatcgttctgtgacaagttaaccaaatgatcggctcctggaaatagtttaaattggaacgcttttgtcgctttgactggtcgcgcattactaaaaattaataagctctgatcttcgggcatacgcataatttcatcgggtgtcatgagcgaacggctcgtatagctgtaactatcgctcttgctgtggctttcttccttgctgtgactggtactctcactaccggtttcaacttttacggtcgatttacctaacagatcactaaagtatttagcggtcacatcattagcggcatttaagcaaattttaaccgcgtgattacctaagatactctcggctttatccttgccatacaaggcttgtagctgggttaaggtctgacaaatggtcgtcacgccaataccgtacccccggcacgttgctagaaattcttcgtacttgggaaacttccctaaattgacaaattcatcaaggataaagtcgacttggtgaggcaatttagcgtgatgatcggcggctaatttgtataattcgtcaaacaattgtgagaaaaacagattgatgaagctttcataagtgttatccatgacggggataatcacgtacagcacaactttgtcgttgccaatctcttttaaatcaaaatccgaaaagctggtaaaatcagccacttctttgtcaacgaacttcgagatggtcgccaacaagctttcaataatactggccttcatttcgcctttggcctttttgaaccctaactcataagcgcgtctcgctggatcagtcatggttagatcaagaaacagggtgtctaacggactatctgcgcccttttcctcagcctccacatcgttttcttgtaagacttgcgttacaccggccaagttcctttggttgggcgcgcggtggttcataacaaacaggattagtgccttcaaaagttgccgctgggtactgaaccatacgtcttttttgccttcggcattttcactctgaacgatcttcgtggcgacggtttcagcttgaatatcccgttggatataatcaaaaggattgtagcgatcactgtgcgccatgttggcaaagttgacgacatgcacttgataaccctgggctagtttgataccggccgtcttttcgtataattcacctttcgggtcagttaccacaatgctgttctccgtctcgttaaacaggttggtaatgacgactgactgggtcttatatgaccccgggcccccaaccacgaagatatttcgattcggcttggtactgttattctggtaaacaatctgtttagccacgatccctaaaatggtgccattcatgttaatctcctcccttcgctgacttttctcgatccactaatgatttgagaatttcggccttggtactcttgttaaacgctgtggtgaggtctttagcagtgatactaaagtaatggtcactcaactcttttagatcgccccaggtcgcactcccgtgggtttcagtgtccgcagtttcccacgctttatgtttgctatttcgtttcaaggcaaaatagatggtgtataggatcacggcgacactgacaataattagtactgggttcttttggcccaaatacaagttgtaataatgccaggggtgtaaagctaattgttttaacaccgttggcatatgatccgcaaaagttagtttatagcgcgacaaggccatgacagagccagctaaaatctccgctaaatacaagccaatgattagcgttagtacatacggccaactagctttaatgctgtttaataatttgtctttcatctaatcacctactatctgtttaatccttttttggttagtgccggtgtaccgttgcttgccatgaatcaaggttggcaccgccgttagttgatatttttgaatgtaatgccgatttttgggttgattcatgttaatcaagatgatgttgtgactaattgcgttgtgccaataaatctgatgaaagatcgattggcaatccgggcaatcatcacggtaaaagaacagaactttatcagaatacttagccagcgtcacgattgatagctgcttttctacgtggttgacatattgatgactggcaaacccgccaacggctaaaaccaccacgattaccgctagggctttaccaacccgcttaattaaggtcactggctttaaaactgctgcctaaattttgtacttcagtgattcgatccgtggtggtatcgaaagtcacctgataaagtaccgttgccttctgccagtcgttgtcgccactcttactttggtagctaacaaccgccaaacctttcatgctttgcccctgcttgctttgcccctgcttgctttgcgtatacaggttcagttggtttaacttggctgaaacactattgctatcaccatatgtgcctttatttgaaaagtattgctgatatagcttgtcggaaatcaagcctttcacgccatctttacgctggccgtaggtcttgggcttaaagttgttcatgacctcaaagaacttggtgaccaccgtattaaagctaagttcagcctgacttttatctttattattttggtaggtcttatagctgtcaatttgggtgctcaataactgcttttgttggttaactttagtcaattgctggttaacttggcgcttctgtttttgtaaacgactgatctgctgttgtgcctgcttaacttggctatgctgataggcattcgttcctaatgacataattaagatcaaactaccaagcgcaatacttaataccacgctacgcttcatttgttggttcctccttacttcttgattggccgggctaacgttacatcgctaccacttagtaagctataaaaggcggtgccaaaggtgctttcgttaaccttgtcgcctacgccaccttgttcaatgattttggtggctttgcctcgccattttcctagcagaatggcagtatggccgttgtttccggctcccgcaccttgattgacgatgacaatatcgccggctttcgcgtcattttcattgatctgtttcagatattgatggctgcctttggcgtcactagccatcgtgccggtaaaccagcccatattggccggtaccttgtaaccagccttattcagggctaaccagacaaagcctgaacaatcggttccaccagttttgctgggattctttaaatcactgcctaaatcggggctggggtgggtttgaacataatagaagtcgcccttcatactttccgcgtttttaacaatgctgccaccggaatagctcgggtcactatcacaacctagctcggtcagatcgccggaactcgcattgtctaacgtattaccggccactggatcactcgcacccaacacagaataccaatgatcggcataaccgtatctttggcttaaataccattgttccgggttcttactcataccctcataatccattaaccaggctttcgtcgctttgtgcacgtccgtatatttaaagatctgcttatttgacgcatagtaactactgttcaattcttgatcgagatagtccaactgcacgccgagattggttgctgatttgttttccttgtgggctaagtcttccagcttatcctttcgaccgcctaaccactgggctaagcccgtggccccggagcttgaattaaccgaattgggatcaaggcgactttctagttgtaagacccccaagataccagcggctgcttgtggtgtggcaccatacttctgtttccagtgtgcaaaaatatttttggcattttccgtcatgctcttactatctaattgtgtttctgtagtggttgagttatcacaactgttttcttgtagctgaccagtaatcgcggcaatcagcaagacgattagcagaagggcgccacccacaatataagcaatcaatttccacttctttttcttatattcaaatgacaatacctgcatttaatcacccactttgtgcttggcctgatcgacttgtttttgcgctgctgattggtcactctgcgcgttctttaagtccgacttagccgaatccaccttcttgtctttgtccttatctttactgccatcaatcttgttggcgtcatctaacttcttttgggcgtcgctaacttcgttcttagcagagttgagacttaatagcgctttgaggtacttagctttaggactgttcacgccagctaacttggtttgaacagtctgggcatcttgcgtatcgttatgggcgaggaaagcttgccctattctcaataacacatcagcgttcgtcgtaaaggataattggttattgagcgtattggtatcataattaacaattgctttttcaagtttcaactggtctttttgcttgctcgtcgccttagttggtaactgccaattagccacttgaccgctatctttgttggcataagccgcattaacaaccttgttcaactgacttgggtcaacctttaaagcttgctggtactggccatgctttaaaaaggcactgacttgcttagttgaagaatagccggcccgtttcatatctttttgcgcttccgaccacttctgatcatttaaagcggtttgaatttgaccgctatattttaatcgtgtgacctgggcttggttctggttagctaagctttgatactttcgttcgtcacttttatggactaaaccgacagccaaaacggccacaatcgccactccggccacgctcaaccataaacgttgtttggttttctgctgggccgtttcaacttcctgccattcgtgataactcacaaagtcctcaatgccgttaaccacttccgttaactcatttaacgacgtagctttagctacttgttgtaaatagtcgtccgggtgtttagctagggcttctttaggattgcttagtagccgttcatagggcgtccccgtcaagcaaaatagaatcagcgctttgtatttggctaaattgctatgtttgtcatcataaggcatgagttcattggcgcgataggcgtaccaaacatgttgcatggggtaataccacagattagctggatttaacgcaatatgatactggctatcagcaaccacattttgcgccatgatttctttcgcaatggccgcccggattgccttattctcatgtggtaattcctttaatgatctgaccttatctggcaaggtataagttaaaacgaccttttggtcttgctcaaccacgttaaccaactgcaagaaattggcatcagtttgctttaattcgtttagctcactcaactggtcgtatcgaaattgattgtgattgagttcgagaattaacttgttcccctgccgcttgaacgtgccgacctcgatatttaatagctgatttgatttactcatttaaagtccctccttcctcttcggtagtggtcaaagcgtcaacttcactgggggttaagaccacgcgcttttgataatccggttgaatggctgtctcacagttgtatttttcttggtaagcttcgggatcaattagccgtagttcttcttcggtcaactcgactttcataaaggcgcgttgactgccataaatcatcagggcttcgccttgtctacggcgttctagtaacttcttttctttatccgagaacgtcattcttaacttagtaatcacatcatcaacgcctttaccgtccaggccaaagaacaccttggtataggagttcccaataatggcttccccaatattctgcccagtatccgttgtgccttcgatcacgtcttgaatttgttgcgttccggcaatcgccccggcattgtactttctgaaccgcttgtaggcttgatggaaaaaggtggcagcggctttgtgcaaggttaaaaagtgaaattcatcaacaaataatttcttgcggttatgccgatctttggtaatttcgtcccatagatactgaaaagtattcagataggccgctgattggacttcctgttcactttgtagcggtttcaaatcaaaggaaatgattttcccttttaagttaacgttggtgtggccgtcaaataggctgttagagccacgggtataactgcctaaaatatagtagaagtctttaacccgaccgaatttgtcagcgtccttatcagccaatttttccaactcgtcataaacattggataaggtcggccactgatcgtctttaatttctttcaagcggctgtatttcaaaacgccactgttgacgtaagcttgtttaacgacatcatcaaggattgccaattcaacttgagtaatcccggttttaaggacttcaaagaacccctttaatcgctggattttatctttgactagtaaatcaaggttagtgaccgcctcatcagcgctgaggatttcttcggagaaaatttggagcgggttaattttgtacttagcattagaagttaagtgcaagactgccccacctagggcttcgacaatcttggtatattcgttttccggatcaataatgtagatttgatagtcttgaatggcgtagcgtaggattttctgaatcatataggtggttttaccaaccccggaagtcccgataatgacttgattttgattaagggtcttgttgcgatccaacatatctacggcaattaagctgttggtatctttgttaaccccttcaatatcgcttctcggcttcaagtccaaaatttccgcgtcatcaaagggaaacatgctgctggcaacttcggtattactttctttgtacgtgtaatcccccatgaggttctcgttaattggcatggttgaccaaaaagcttggaacgtcgctttaacgggcactaggggcctcatttgtagcttaatcaacgtattcttgacgttttcggttaaatcgtctagctctgctaaactattggcccgcagataaaccagcatatgttgatagacaaatgtggtagaattatcaaggtatttatctagttgcatattggccgaatcaatataattttgcagaatcttctttttatacgggtcgaacgtatttaacttctgcgcttccttattttgaatcgtcttcttgtaataggtaatcattgaattgttactggcgctgtcgatatattgcacaatatcgataacgccttttttgcgtttcaattctgataaccagttgccatacacccgcttaggatagtcggcaatcgctaacacccgaataaaattctcccccgactggacgtaagtggggtactgttcccagctaaacgggaatagtgaatgcaagctatcgcgatcaatcagcttggtaaagtcttcaacctccggtttttgtttattaaccgctggttcactattttgctgactttctttcttggttggcatgaacaaatcaatgaccttatcactaaaactcatactgttgcctcctatccattgaaattgattaagttctttaaaatctcttggacttcttgactagtcaacactttggccgtcacatcaaagtctgttaacgcattttcaatatcccgcttaacctgttcgatcttctcgtctaagtgggtgacggctaagcttaagcttttaacgcttttgtccttaatcggcaccttaacgattagcaggtgttgcttagtcgtcatgtttttggattcttggactttagtaaagtgatccaagtaactggccattaattggattttgaactgttgctcggggtgatctttttgtaaagtgagataccgccgtttgagaccattgagataagccgtcatattgacgggaatcgtcggctctaagaactgtaaggtgtcatcaacaccttcacctaaggtgctcatcagaaacgcaccatagtcctcaaagacgtcttgctgttcggtttcattaagtagatccaggttgatcccactaacttccaaaatgccaacgagattacccgttttggtaacttcgtaattaccatacatacccaccaccaagctcatgtcatcaatggtttctttgccaccattgattttgggcggttggtaatcccaatctagcctggctgatttattggcggttttgttcttcttcaaacgcatttagttcacctcgcttcttcggttttaaataaaacagtctctgaccattggcatagcggcgtttcagcttaaagttatcccgcactttaatattcttccgcgccgcaactggccgaattgttaaaatagccatgacaatcgtcatggctaagacaacaatcactatttttatcaggactaagattagaccatagggtgggatcgcaataaaaattaagcccactagtcctgccagcgccgcatagccaaaatccttcaaggtgtagtctttccagatcccataatctttatctacgttctctggaaagataaattcttttcctttcttcattttggcaggctcctttttaaattaagtgaataggctgtaaacccaaggtaatagccagataatcgctgccgctagggccactaaaccagccacccgaccaaccgcgtgataaacctctgatttctctcgtggatcgtctgcgtcaggcattcttttgataataataaatagcgcgacacaaatcccaactaaaacgaccaagccagttaaaataccttgaatcgtcttaccagcttgagttaacttgcttttaacttcgccgccgtccgccgccaaaacaacctgggcgttcatcagccctaaataaatcgcagtagctccagtggttgctagcgctttcattttgctgaacttcatgttattcctcctttccctcgtcttctgatgaccgtaattgaacttgttctgcctgggtttgctcgggttcctgctggtagaacttatccaattgttcctcggcaatttgctggcttggtaatgggtcggtggctaatttaacgcgaccattttcgctcgtggctaagtaatactctttttctgactgacctagttcttgagtctctaagacatgcaaattatgttcgtaacggcctaaggcgttatcaactttcaacccatagaaacctaagaagccttctaagaaactctcaccaaaaaaggtcatttcgtttttgatctgcttatattgatgggtcggtttgtcgctcaccaatttttcagtctttttagcattttgactgtcttgatggcgattaaaccagccgctaagttttaatggttcaatctttaactggcgtttaacggtcttcttaatcattgcttgccgaacttcatcgattggctgaccgtcttgatctaatatcgcttgtaactgttttagctcggttaacttttgatcgtcatcaaccacaatggccttttggtcatcatggagtaacttgccattaatgccttgccagctttctactttcattggatcacctccttatattgcccttttctaggctagaaatattaagcaactagctttcccctagcccacccggtaaaatggattgttaggagggtaacacctagaaggcgtaattctaggtgctgatccccgttagcaactctactgctgacgaggacgccctctttttttgtttgtttccttatccattcaatgccttccaatgaaattaatttaactgtgccggtttccattaagtattcttcgggcattctatttgggtgccgtcttaaccataagcttacatatgatcgatcatgccctagcttgataccggcctgagataaactaatccattcgtgttgtcttgccacatgcaggtaactcctttcttaaataattaactaaattatagcaccatttgaacacacttgtgtacatttgcttttacatttacattacaagtgcatgcccccatcttcatgccggtttcgagtttggtgttgccgttgctttttcgtcatttcccactcagtctcctttaaaccttgcgcctgtttttgccgttggtaatcttcatcacgggcatatagaacagtcatgatcgcgtcactaaaggccgtctttaagtaatagtctggactaactggcttgtaatttagcggttgataatgtccgatattttcttttctatactggtcgtccttggcttgttgcccttttaactgtttttgcattttctcgatctgactgttcttaatcgtcggatcggctttgcattcgccaaaaaagagttgtttagtgccatcatgctttaaaacccgttgtaagtgatgattttctaactgatctaagctaagctgtcccgataaataagctagtccttgttgatgttcttggggactgaacacctgtggtggatttgcttgccactgttcaatcgtttcggcctgacatggctttaaaacaggatcatagtacatcacggctgtataggcttgttcctgtttaatcaatggcaatccatctaaatcacctttgggaaaggcccttttcaatacttcatggtattgcgttttaatgacttgcttaacggccatgattgcccgtagatctttgactgcgtgagtaatcttttgctgttcggttggtgaatatttctctagtaacccttgatcgacgtgttctagactttctaagttatcgtcatgaatcatcagcgtatatttcagttcgattttgacttccttttcttgttgcattaataacttccagccaacgtatggccgtttggtaaaggtcaataattgttgggtcaacaaatcatcacgaatgttcattaaacgttcgtttaattcactacccttgaaaactgtttgttcgctatcggtttccttaattaattctcgtctttcagcttgcgtggtctgttcaaaattaagctctggataaagatttttcgtcgtgcgatcgactactttatttaagagttcatctgccttttttaatgagctttcctgttggttaatcgtcaataattttttagtcacatcttcaccaattgcatgtttaattaaggtactgttcttccaattaaatagcatgcgccgtttatcatctaagctctctaaactgatataagttttcagttcatggcttaactctttaactacccgtttttcattaaacgagaagtgtttacttaggctatctaaatgacctctattgattactttttcttggttatttttataactggctttggccttgcgatagtccttaacttgttggttaaattcttttctttcatgccgcttactattgattccctcatgttgcattggggtatcatctattccctcctcgataaatgatttttcgctgatccgatcgggaatatttttttgctctaaaacttgattgacactaaccgcccaattgtgccgccattcagttattttttcttttttatcccaatcaactagccacacctttcttgatcttggaaaacgactatttcctgtataagtctttttcccattttcatctaatatattttctcttttacttttcaatccccatgttccgtctggattaaatggacgattagttagcataacatgagcgtgcggattatctgagtgatctctatgaattgctacgtcggcaaccataccctcatcaacaaaattttcttgtacatattttgtcaataattctttctgttcatcttcacttaattcaactggtaaagccacgttaaactcttttgcatagcgtgaatttgctcgccgatcttttctttcgacttcattccataatttctctctatcactcgcccatgctggcgcattctttggtgtcaaaataaagctttctggcgtgactgaccgagcataaaaatagcttcggccttctttttgatcgaataacttttcaccacttcgataagcagatccagcaatggcactacgtcctttaccagcactaatattttgaaaactcatgtgaaaaattgccatgtcggtcaccacctttctttgggtttatgggtttgcttttgttgtcgctaacggcgacttctgatacaagggtttagcacaataacacaaccaactttagttgttgtgtgtaagtgcgcattgacctcgtttcactcggtctgctgattctcctgaatttatttttagtgtatgcctttcgcttcgctatttcaacttttatcctttgacttaacgtttcctatatgatatagtttcggtgattatttctaatatgattggagggatcgttatgtctcaaagtaacttagaaaaacaagaagctaaattaaaagcccttaatcaaaaaattaaggacgaaaaaaataagattgaacaacggctaggtaaacaaatcatcagtcaagccaatttagattatgctaatttgtctaacgatcagattaagcttttagctaagcaattttctgaatttttaaaggtaaagtccgtagatcattagccatacgagatggggaaattctatgtctaatcaatatgaaaaactagtcgagcagcaagcgcgtttaaaacaaaaaattgagcgggaagattttaaattacggcaatctaaatattatgaaagtcggcaagaccgcaaagctcgttctcgccgattaattcaaaaaggagctttgctagaaaaatactttcaagctgataacctttcggttgaacaaaccgaagagcttttaaaagcatttgccgattacgttaatgcccataagccgaataagctcaaaaacgatcaacctaataactaggccgatcgtttttattttctggatcattttttggcttaatttctgggttttgatccgcaaaatcttttaattgttcttggattcttttaccaatttcgtcttcaactgatttaagctctaagtttgctctaatttgtaatccttgaatgccattgtcatatgtccaccgtttaattttagccatgtcattagttcgataataattggcaattagttcgttccattgatcccacttatctaacggcacattgattaagcctgcaccaccgtcaatcataattttattagcacttaaagtcgccgtccttttgttcccgtcccaaaagatttgttggcgcatattatgatacataacagtcaatgctttatcagtggtcgttgtttgcggatcagccaaaattttttgtaaaaaggattgttcttgtttttcgttaattaagggtggttcaaaaaagtcttcactgcctaaatcaactcctccttttccttgccgtaattctcctggtactaaggcgtcttccgcggccacaatcttgttaatttgtttttccatggttaacgttaaggaggaattttgagcagtgatatattgccacccacgctttaagttaacaattgtcaaaatatcttcaacaggaacgcctgccacactcatgccgtccataatggtttgtgtttgcggcaaagtggtatttacgccttcaaagcgggcactagtgtgtactagcttggtaaaatttgttcgagcaaaccgtttgttttctgcaactgtaaattgatacttgtccatatatgcttgtgtcttagtcatattttgtgcctccttttcattccaaccactgattctttgactcgtccatgttaaatcacgaaatgcttttcgttgataatttttttcttgccgtttatctaagaggtaagtgtgtaacgcgtcaaacaacttgcgcttatcagggtctggattatgtgccgcttgttcccaaatgccttaaatattgactgtccaggggtcagccaacaattgctctattttttcgacttctttgcttggtttgattatttaaaaagctcccttcactttcacttagttcagtcatcacctgttcaaccacttaaggcacctatttttgcttctaaacgattttaaagcagttttaatataattatgcatgcaacacttaaaacggcttaaatgagtccatatgacgtttaatttcaagaacgctcattgtcagtgttctgttcttcggggtgtttggccgcatattctctagccgcttgtttattccaccaaacgccaaataggttttgcatggtgccgtacaagtagttttccacgttcttgatatgcttttcattgcttcttagggcgttaaagtagcgtcttaaggctttagtcatcaaaggttttagttcttcgtcgtaaagcgggattatgacgccaatatcttgatgatccttttcaactcggtacttagcatttaagataataccaatgaagcgccgcatttgttgcggggtacggcatcaaaaactaagtagttgcacaacttcgggttctaagaaaaccggtaagccactgtcttcatcagttaagaagtcattagcatgatttatgagatcctggttttgtttttgaatttctgctggtgagaaattggctgtggaaaagtccaacttttgagtatctatattgcatctgtttttgtctctttctttaggttctctatatagattaagtccattttttgaacttccgctcgtagcaagggtttgagagcttttttgaccaaattcgccgcgtaaatagacatcggttgctttcacatcgagcttggacagatataagcgattcggttcatttttcttagttttcgggttaaagtccatttgtttctgaacgagtaatccgattgattccaactctgcttttattttgatgacttttccctttgaacaattgaacaagtccattagttcttgattggtaaagataaagtagacgtgtccttcactatcaacccagttattgcgcaaagaatactctaatcggtcttttagtaccatataggctaatttagcgtcattgcttaaatgcttgtattgctcgccatacattaatacctaccattaagtttttttaattgcaatataaattttaagaatttattttgcaattcacgaactaagtgacaaatgtggcgtgaaaatatagcgtattcatgctactacctccaatatttttgtaaatttaaactaaatgccgattaacgacaaattttaataaattaacaaatcatacaatttattaaccgctaacaattatgaatttagttaattaaatttttaacatgaaaataaagcttcttatgtttttcaaacgttgtatatacggtatttaaccctttttgacgaactcttgttcgctttgttcgtgtacatcatgacatagcagacaattaagttgcaacatgaaatttaataaaaattaccctaggtactaataattagcctgatagcgccttaaaagttactcccaggtgatagttgccccactagttttatatgctgttatggcacgtttactgcctagttgctcaaactgatcaaacatagtgctaaatacatagctatttaaatcctgtattgcacccaaccgtacttgttggacaattcgcattaaggcatcataaacaggttggtcgatgtcttcgtcttgtaaatcaaacaagctgctttgtatctgatgactgtttaatgcttgttttttggcacgtagaattgttttttgaacagtacaaaacaattcaaaatctccgtttgataagagttttaaggctaaaagttgttgtttagaaaagatattgtcgttttctaattgcacttcaaacagcgcagcgtcttgtagctgcttgatattttgaggactgtccgttagagtatctgtttttttagtatctgtatttaaggttttaagatattcagtattattaatatcagtatcactagttaccgtttttcggtaatctagattactgtttttcagcaatctagatttatcaagggtttcaggctgtccatcattcatagatgttggtaaatcaatgtttacaacttcttctgcgagtggattttcagctgtttcaagttgatcgatgccataaatatcgttatcagtaatttccggtccaagtaaatacatacgatttgctttaccttgtcccatacgtttcataactaataattgggcctcagttaattcctttttgattgaagtgatttttgagtgtccgcaaccaagaatctgctctagttgttcgccagtgtaaataaaataaatattgccggctttatcgaaccaatggtttttgattgaaagttggaggcggtcagaaagaatggcgaaagcaagttttgcttcagcactcaattttttatatttgtcgtttgtcataaagaccttaggaacttggaagaatttaagtgcgtattcccgcttaatgttgtaatagttcagttgattatccatgttagatctccttatcaattaaaaagagcgaacccgcatttgcgagtccgctctagtgtttttagagtaggcaaatgcgagcctggttaaaccagaatctcttttgaaaagccgcacgacctacttttatgtatactcaaacaagcctttttatattgctattttgaacaaaatagcctataatcaaagacatagtttagaagaaattacagtcaaataacttcttaaagtgggtcatcacgaattaccgttcgtgatggctttttatttactatttgaaaataacatttatatcgaagtatagcaagggacaactataattaaagtataagttatactcggttttactagatgtaacttatactttaaatagattaaatgtataagttataagtttttggaattggttaatttgttgctgtggaagtgatattcaacaaattaaaaggtataagttataccctttctgctttagaacgtgtataacttataccttttttgattgtgtataaatataatttatttttttattttctcaaattcagcagcaatttctgattttaagtgttcacttttagccataccaagtctcgtatctatataggaatcagctaaagtgttaacaagtttatcaaatgatattcttttagttgtagtagcaaattctgtcatataatcttgcaatagagataatttactttctaaagctggtgatattttcttaggacgtgttacctggtatctgtcatcttttatttcaacagggcgaccttgcttttttgatcctttttctaacgctggagaagaaggtgttgttgttttagatgttgcttttctactattcattgttgtaccggtaccaaatgaatattcgccggcaatttctactgattgaacttttgattgtggcttatttagtaatcgtgtgaattttttttcttctgtattgtcagtgttaaattgtcttacaaccatttagctcactccttataatgatttcaaatattgatctctactttcaatctctccaagaatttcattgaatccgttatgagctttgaagtcccattgatcaaagttaccatttttatatgtttttaaatcaataccttctcttgagtatcttttaagtcgtttttggtgcgtaatgatagtatcagcaacgacatctccatacgcttctttggcctcattgtaaatttcctgatcaagattatcatcaggttcaaccatacaagcaacaatagcaataacttgaagattaatattaaattgttcaaccataaagttttgatagccaatatatttattcacaccatcaaaggattcatcttgggtttgaaaagcaattatgctgtaatcagatgcggccatagcgttatcggaaaattctgaaatagtcggtggaacatcaatgaaaatagtatcatattgtttttttaaatcattaattagatttgcaataaaacgtacttgttcttgctcgtcgtttgaatacgtgcgaataaatgcaggaaagtttctaaatgcagtgtcgcagccaatcatgtcgagattctctcgaatattatagatacattggtccagtgagactgctctttcctctggtgttaaagtatatataatagcgcgtggatctgcttctagttgttgaatacctttatctggagactcttgtgcgagtgcttttaatgtttctgtgtatcttttactgtggcgatcaataatttggtctgtgatagtatattgaatttttgaaagaccacctgttctagctaagatctttgttgcgttaccttgaggatctaaatctagaactaaggtttttttgtttctgataagggcattgtcgaatgcaagcattgtcgccatcttggtctttccaacaccgcctttaaaattaccgatagttaatgtagttgccataagaaacctccatctgtattgtatatataaagtataagttatatcaaaaaataagtcaattattaaagtataagttatataaaaatacataacttatacctttattaattaccttctattaaatcaatctgatgtttaattctaaaaagtgttgcttttgaagtgttgaaagggtagattgcaaatttaatccgaatttttggacaaattgataaatattttttgaatatttattcaatctcgtttgacccgttatttcgttagcaatgagtttttctctcgctgacaacatagaatactataccaacatctaaatctatcgtcaagtaaaatttgcataaaattcatcttttttttaaatattcaaacaacttagttatttgcaagctttgcttggcattctggacagataccatgcacttccattcggtgcccagttaccataaaccccgttagattctcagcaatcacttctacatcatctaactccggataaaaaacatcaactacttttccacagttctcacaaatagcgtgataatgcttggtctgcgcaaaatcaaaatgactggatgcatctccataagccatttcttcaataatccctaatgaggtaaacagacgcaagttattatagattgtcgcaacactcatattcggaaagcgccctgctagcgccttatagacatcgtctgcagtcggatgcatatgagtgccaatcatgaattccaaaacagcttgccgctgtggcgtgatccgtacgttgtgttctttgagtttccgtaacgtttgttgcacgatgtgactcattttgccaccacctttcgctaatgataatcattatcatatatccttattgctgtaatcgtacctttttttgacgagactgacaagtatctttgctcaaaaaaagacgttacgcgagtcccgtaacgtctttacatactttacttcaattcaggtgcatccgtttcataaaggtccattgttgacttaccattattttgctggataacactcgttttattgttactgtctttcaacttagctttagcatctttcaccttgtagctaatcttagacttatctggtttttcgaatccttgtggtgtatagaatcgaagtagatcgccggtgattaccttgtcagaaagtgacaattcttccgttacatgttcactgattgccgttaattgcttcttctgcgctgccgttaaattcgtcagcgtcttcccattagtcgtatcgtaataggtgctgcctaccttcgtatactgtggtgtgacaaagtccccatttctaaagacaaccgtctgattgcggttaggcgcaagtaaatccgaaccaaattggatggtatcgtcattttttacacctaataggttcaataaggttggtaaaacgtcaatttcaccaccataggtatggttaacgccaccttttaacccatccatatgcaccatgaacggtactttttggaattgcgcattatcaaaatcagtaaatttatcctgattcaataacttcgcaacagccttcttatggttccctgaaatcccataatgatcgccatatagaacgagcatactattcttatctaagccagtcttttgtaaccaagctaagaattcaccaattgattgatccaaatacttagcggtttgcacataaccatcaactgtatcatcaccagtatcggtcttagcaattgattgattttgtttatccaataagtatggatagtgatttgtcacggtgattaatttagcatagaacggttgtggtaattgttcaatgtattgggctgagtcttgcatgaagatcttatctttcaagccataacccacgttgtagcctttaccttctttaaagtattgagaactgaagaagtaatcatagccccatgacttgtaggtattatcccgattccagaaacttggcacatccccatggaatgaagcggttgtgtaaccttgttgatctagaattgatggtgctgcttggaaggtattggttgtcccttgagtgaccatggcggccccttcaggtaacccgaacaatgagttttcgagcattaattcagcatcagccgtcttaccttgaccaacttggttaaagaaattgtcgaaactgagggtgttttggtcgtgatatagcttattgatatttggtgtgacttcttgaccgtcccacttataatcaattaaaaattgttggaaactctctaaatggataacaaagacgttcttacccttagccacgccagtgtattcaacattgggtgcaacccggttgtccttcatatacttcaagacactgctcatactactactatcagcattagccttaatcgcattattcttggtcgtcttcacgccatcatagacagtgtatgcattcatcccaagatacttaatgatgtagttgttatcgaacgtccgggttaataacccagaacgatctgcttctgcaatcccgaggttggcaccgaataacacaacagctaacccagtaattgcaaatgcattccgcttcataaagacacggtgatcaatcttcactaacttagtagccaataagatgattagcaataaaacatcagcgaaaactaggaaatcagaatattcaataatcccagcaatactcttgcccaagttatttgataccgcaccagagcccttcattaagttaaacgttaagaagtctgaaaattcacggtaatacaaaatattcgagaataaccaagttgaggttattaaatcaataataatcaacgtaatgtatgactttcggccattcataaacaaggcaatcccaaatagcaataaggttgttggaatgggattaatcgtcattaagaaggcctgcatgccacctttgacgcctaagttaaattttgtttgatatgcgtaaattgttttaagccagaatagcgcaactgcgaaaaggaagaatccccatcgtgtgcttaatcctgattgaattttatgaccaatttgtttcatcgatacagtagcctccgttaaaggtcgttgggctttaaaagccgttgacaatctgaaagttagtttacacatccgtgaaatgaaaagcaatatgtaaccggcttgaatgccaaatattaaaccatttttaataatctgagtcgcaactgagcaaggctatcacctgcttaagtagcaaaaaaaccatcaagtaattcgatactcaatggttaattaactagtctgctaataaatcgtatagttccattgcaactaaatcaatattgtcaaattggaattgttgatgtgtgttgctgtcttcaagttcaaatgcttgagcttgaggatcatagctaacagttgcttttaaatcgccgtccttttcaaaacgtctttcttgaacctcagcgctttgatcttcttgcattgctaccagacgtttgataatcgcaactaactgtgatgattgcatggcgaagcctcctttaataactaactatcagtttatcagaaaaagagcacttctgcaccgtttatatccaattattttgcagaaggccaccataatttaattaaagcttgggtgccatcgtcgcctaattgtttatcattaacgagctgcgcatagagtttcttagcttgaagcgtagctggtaaatggagccccatcttttcggattccgttaatgcaatctttaaatccttcaaaaaatgttttgcgaaaaagcctggtgtatagtcttgcgctagaatacgtggaccatagtttgcaaggctccagttctgagcactcccaccattaaccgtgtttagaaccgcttctagttctaatccggctgctttagcatacactaacatctctgtcattccggtcattgtgccagcaatcatgatttgattggccatctttgtatgttggcctgtcccggcagcaccgaagcgatggacagtcttacccattgcttcaaaaacgggtaatgccgtttcataggcagcttgatcgccaccgaccataatcgtcaacgtcccgttttgggcgccgatatcgccaccagaaacaggcgcatctaatgcttgcagacctttgtcagctgctgttttagcaattctctgcgccaatgttggcgtgctggtcgtcatatccaccaaaatctgaccaggttgtgcagcactaaaaattccgtcttcaccataatagatggcttcgacatcttgcggataaccgacgattgataacacaatctgactttgcgcgacaaccgctgctggtgaatcagcccatgttgcaccgagtgccacaactgcatccgctttttgttttgtccggttatacacgacaactggatagtctgccttcaataaattcttgaccatgctactacccatgacacctgttccaatgaagccaattgttggttgcatcaaaaacgcctcctactttttatcagttactcgtggtttaactgctaacgccccaatccccatgaacatcccgagatagtacgtaaacaatcgccagagcaacatgcctaacaccagtttacttgaactcgggataaaagtggcaaataacgtcttaaaactatattctgccccaccagaaccgcctggaactggaaagagcgagacaatcatgacaatcatgatgtgtaagaccatcacctctaaataattaacatgcgggatgccaagtgccaataagacaaagtatggcacactataatagaaaaaaagttgcccaagggttaaaatacagcccttgattagtttctttttctcgcgtttaagatgtagactctccgcgtaaaaggtatcgattttggccattaacatggtccgccattccgtcacccgtttttgggagacgaaccagcccaccggaattaataaccagtgcactaactgtttcgtaaatcgattgtaatacatgattagcaacaatacggctaacacaaccacatgcacgattaatccgaaagtaatcaaaatcgacagcgtcccaaaatgcttggaaacttgcgagaaaccaatcatcatacttaataagaaattcaccagtaccatgaattggtaaacaataaacttcatcagcagtactgagctagcttgcccagcttctacacgggattgcatcaacgctaccagttgtgccggttgtccacctgaagaaaacggtgtaatcgcattgaatagttgtgcaatcaacggaatccgaagcgcattgtataaagaaaagtgttctgtgcggtcttttagaaagacgcgtaagacaagtgcctcgaaaaaccacgaaattaacatacataataaggcgaccaacagccaccaaagtttcagatgactaatatcgataaacagctgtttcaacgccagcgtgcgactttcataggcaaaaatcccacacccaatcaacagcatgactgcaaaaacaatcttattcgttctactcataaacgaccctttttcttgttattagcaacgatatgaaaaaactattgattatatgatcaacagttttccgccagcgcgacttattttttagtatctaaatcttctaattccaataaatcatcttggtctaactttaattcgtcatataatagctgtgattgcttatagaaatgaatcatctgttccgcaaagtaatccgccgaaatagcatgcaacttctttcggcgcggtgctggatcatcaaatgcatgtggatgattcaaataattcgatacttgatggatcatttcatcttcgttcgtaaatgtcgtcccaattgaaggatcagttaataactcagccgcatatggacttgtcatgacgacaatcttgagttcagcggccatcgcttcaatataagttaatccttgtgattcagagtcactggcggagacaaaaagattcgccatatgataataatttgcaacttcatcgttatcaaccattccagtgaaaatcacgtggtcggtcatgtttaacttggcaacctgagcttctaaatcttctcgagctggaccttcaccaacaatcactaacattaaatctggtgtttgggcgactagtttgggtaacgcatcaactaagatatcaatccgtttttcataagcaacgcgactcaatgataagagcacaggttgttctggcgtcaagcccaattcggcccgtatgtcgcgggtcacttcgcgctcaaagcgactaatatcgaccccggtcggaataatccggatgggggccttcacttgatagccatttaaggtttgagaaacccgctctgatggtgccacgatgcctgacatgtgatataaaaaggcctttgtcatttgcttaacatggtatggccgtaataacttcccgtttaaaacatagtgtaaataatcctcgtacatcgtatgatacgtatgtaaacaaggaatttttaaatttttagcgacaaacttcccgatgtagcccatcgaaaattcggtctgggtatgcacgatatcgagatccaattccttagccacttgataagcgtgaaataagccgcgcacagcaattcgccgatccgtaaatgagacaaacgggacactagcaaaccggaaaatattcggttcgactgcatctttgtcaacatgtggatcggtcgttgtaaatatgtagaccgaatgcccttgtttttctagggcttcttttaatgttttaatggaggttgccacaccactgacttgtggaaagtaggtgtccgtaaatatcccaatattcaattggtttcctcctccttatctttggacatttgatttcattataataattacatcgcctagatgcaatcaatgtcactaattgtaatctattcatactagcataaaaaccgtctttagacctaaaaaacagccaatttacgttaaaaaacgggcactgcacagtttttgtgcggcgcccgtttttttattttagcgtaaccaatacgtaattgagaagattattaaacaccaaatcggtaatgccactaacaggccgttgcgaatacccataaaaaatttcatcatcccacctcatttcataaaccaatacgaacagcttgctatttagggtcactgtctactatgataaaggtaagtttaggcttcatttattaagaactaccgtgcttttacttaagaatgattaaaggagcaagcgatgcaaacttatctcattaaaaaacctcaaaaactcgaattaacctatgacgaaaatatcctaacaattcactatcccggactgtttaagaagaaacaaaaccaggatcgtgacattccgtttagcaaattaaaatcggtccgcttttttgaagcgacttatcggcatggtcatctccaaattctctaccaaaaacccaaccacgccctcgaaaaaatcgtcatcagtttcgaacccgacgataacctcgctgtgcgcaagttatacacagccttagcggactatctcgaaaaaccaaccgttgaagaagacctcagttatgttaagaccggtgatcttatcatggcttacctcaaaatgcgcgacgacggcctaatgacccacgaagaattcgaagaaaaaaagaaaagaatactaggaatggaatagagtgcgcagtaagcccgtttatcttctgaggattagcttaatcaggcggattgccgacaaagtcggtgatttgactgatgtcgctaaccggaagaagatggcttacggagcacgtttcaaagtagagtgcgacggcagacgattatacgctgaggattagcctaatctcgtgaataagcgacgacgtcgattgtttgcgggacgtagctaaccggaagcggatgtctgtcggagcacgttttaaatcagagtgcgcagtaagcccggttatcttctgcggattagcctaattcaccacaaaaaaaagggccaacgacaaacatgtttgtcgttggccctttttttaatcctcgcgagatactgagctaataaaccactctttatttctttataaaaccaattgccatcccgatgattaagatgaccaacacaataaccgtaatccaaacgtagaggtaatccccttctttagcaaatgcgtagattgataccaccacacgcaagactggcgttaaaatgaggcagaataagcccaacataatcacagcgccagccttaaatgcagcaatgccactgaaaatttcggtaaaggtcgttggaaattgatattctgaataacctgtaccgccatgaataatcgcaagtaacatgccaataatgagcagcgttgctgaaaccgccaccccaatgcgtaaaattttaccgatgacgagttcaatttgagccatctctgcttttttatctgtcattaaatatgcaccccgaatcctttaagcaccatttgtaaacctgtgtataacaaaatggggataaaaatcatgcgaatcacacgtggttgcaaatactgcataatccgtgaacccacagtggaacctaccaaaattccgattgctaacggtgcagcaacgctgggaataatcgcaccgctgaagaaataaacagtggccgaagctgctgccgtaacccccatcatcaaattactcgtggcacttgatggtttcaatggcatcttcataatcgtatccatggcggtcactttgaataccccactcccgataccgagcaagccagaagcaatgccggccccgaacatcatggcaaagccgcctggtacttgttcaacagcgtagtcgacttgttcttggttggccttatcgtagtaagtgccatttaagttcaacttcttggcccacttatcttcaccagcgccgacgtgttgttctgcaactttaccacgtaatttttgaatcatgttgtacgttgaaaatagcaagaatgcgccgaataagatgaataagaatccagttggtacgatgccggtcaataacgccccgataatcgccccgacggtcgttgcaatttctaggaacatcgccactcgtaagttgagcatatcatctttcaaataggcgatagttgcaccagaacttgttgcaatcacggcaataatgctggccccaatcgcgtatttaatatctaggccaatcgctagcgttaatacgggggttacaatgatcccgccaccaatccctaagattgaacccaacacgccggctaaaacaccgacggcaagtaataaaataatttgttgcatctcttttctcctcttaatgcatttttataaccgtttttcgcctgttagtgcacggagttccgttaaatcctgactgacttctaaacagcctaagtattgtccctgtggatcacgaaccgcaaaatagcgaatatagacgaacatcccgcggaagttcaaccaaaaatcagcatggtcttctcgccccgcatgaaagtccgctaaaattttctcaaccttatccacactctttggtggatggcagttcacaaccgcgcggccaatcactgcccgggttcttgggaaaatacgatgctcgttatctgagaaccactgcacaatatcgttttgatcgacaaaggttaaatcaagcggtagtacttggagaatcgccgtcaattcactaatattcatcgacccagatggtagaacgattttagcttggttatccacgccaatttcgatatggggttgtggtgcttctcgacgtgcttgaaccttcgcttttggtgccgcttctttttcgtcagctaacattgccttcacaaaatcaggcatttctggttttccttcatctttttcagcgggggcttttggtacaggttgtccgtgaatttcaaacggaatattagccgctgccgccatcgaagttggtgccggttctggtggcgttgtttgggtcgtcatttgcgcatccgccaacgattgcgccatcgcattcagttcttgcgcaatcttcggcacggtccgcttttcggccgccgcaatagcttcagcacttggttgccatggtaatgggtctggaattaaggtatacccgattggttggctttcagaagcaattagtccccagtcagctggtgtaaagacttcattaaccatcggaatcatgatttcttcttctttgaaaatcatttcttgaatttctttgctcatcttttcaacggctgcttcaattgcatatttatccggaattggttccgcagttaccatttgataggccgtcttcaccaacccccgaatttgatcatccaccccccacatcactttgggtggtgcagtaattccatattgatccatcaacggaaaaattaagttttctttccgtaaatagtggcggtcgatcaactgtaaatcttttaacgcttgttgcatccgcacgagataattttgatcagtccctgactgctgccatttcttcaaacatggcagtaattcatcatttaagagcgagttcatgaccaaattttctaatttcatcacagcgactgggtgtcctggctgttcttgttccggcgtttcagccccgtttgaattaatcgcccccttgaaaaccgcagcatggacattacacaaatgttgaatctccatcgggttcaagccactggcaatcaattcccgttcagcagacgtaatttcagacacatcaaccccagagaaggactcatcaaaaatccgcttagcctcttcaaacgagccaccttcatgcagcatttttaagatctccacgattcgtttttggcggtacgcactgctatactgttgctcagtcatcagctaacacctcgaatccttgtgcttctagactagcgataatcgtcgtcaaaggaatttgcttcatcttagcccctttaggcaatgtcataaaacgccccgcagtattcaaaagcgctgggttcgtgaccccatcaagtccgatttcaacaagcactggcaccacttcaggataggccgttaccaattcataaacggtttgacttaatttaatttgttttgccatcataatctccttagtcagcgttatttttcaatccagccaccatcaattggaacgacggtaccatgaatgtaatccgcaacctcactcgccaagtaaacacttaagttcgcaacttcagttggttgcgcccaacgccccgctggtgtctgacgggcaacttcttgtgccatctcaccagtccccgcaaaatcggctgcgttcatcggcgtctcaatcgcacctggggcgatacagttggcgcgaatccctttagcggcgtaatcataatcaagctgctttgtatagccaatgatggcgtgtttcgatgccgtataagccgcaccaccgccaccagcaactagcccagcaatcgaagccatattaacgaataccccacgcttttgcgcaaccattgttggcaagatcgcatttgttacaagatattgactttttaaattcgttgccataattcgatcccaatccgcactactggtatcaagcgttggtgcataagcatccaacacacctgccgtgttgcagaccacatcgattgggccatgttctgccagcaaagtcgctaatgtcattgttaattgcgtttcatcacaaacatcaacctgcgctgtgatgcaccgactatcaacagggacttcaatcggctggcgatcaagtgctaacaccaatgccccctctgctaaaaaagcggccacttgagcgcgcccaattcccgatgccgccccggtaattaaaatggttttagtcgctaaatctgcaaaatgccccattagtcgaccaattgccaatcatcagccaatacatcacacgatgttggttggaacattgagtatgctggtgtttcggttgttttaattaataggtagggactaattgcttgcccctcgaatgtcccatcggccacttggaaaataaataattctggaccatcccagccagtccgtaccacttttttgccagccttaattgcattaatcgcttcatcaaatcccatgatcattacctcatttaacttaattttttaaaatgttgaacaatcaaccttatatgatattctagcacgccactcaaatcggtaccaattaaaatcacaggcaattcgattcaaaaaaggtgtgaccaatattggtcacaccttcctgaagttaatttgatttgcgtttaaacacacgcttaatcacatcccagacccctagtgattgaactaagcgttctgcgggcacatactcgcgaatggcgcggagtacttttttgggttcctttgaagcaaaagtatacgtcccatttttctttgtttggacagcatagcggggaatccacttgcctttgaacatgactgatgcaatcacatagtcaacttcttcccatggaatttgaataaattgtcgtgcgtcacgatcattgaaaaattcaaaccctctatccccgatcatgatttgtccataatcagagagtgctgtaaacgacgtggctttaatcactaagtccacctttgtattaatcgattgaaccataatatcgactccatttccaaaaacttactttcattatacgcttttataaaaaggaggggctaggacaaattgactttgtcctagcccctcctttgttttctaaacgtgcttcagtaggcatattcctgcggttaaccaaatttgccaaatcaccgactttgttggtaattcgcctgattaggctaatcctcagaagatacccagcttattgcgcactcttttacattaagtgtaatagatggaagacaattccgactacgaataagccaagaataatcacgattggtgagactttcttcttaagtaaccacatacagaataatgttaatcctaatgcagctaacccaggaatcaagctgtccaagttgtcttgcaacgttgtcactttattgcttgtcaatgacaaaccttgagcctgttgttgtaaggctgattgaatgcccttagcaccgctaggtaatttatcccagtcgatgaatgcgcctttgtccaacttaacagatgaaacaactggcgtaaacttgacagatacccaacggttaaccaacgaacctaagatgaacatcccaaggattgaagcaccctttgtgatgtcttgcaaaataccaccagataaatcttctgtaatctttgaaccagcacggtagccgaattcttgtgtataccacatgaatgacatccggatagcattccaagcgataaagtaaatgattgggccaagaatgttaccactcatagcaagtgaagcagccaaagcaccgatgattggtttaacagtgaaccagaatacgggatcgccgataccagccaaaggtcccatcatcccaactttaaccccttgaattgtaacatcatcaattggtgcaccattagcacgttcttcttcaagtgccaaagttaccccgatgattggtgaagcaacataaggatgagtattaaagaattccatgtgacgaactaaagcagctgcccggtcttcttttgttttgtataatttcttaattgctgggattaatgagtaagcccaaccaccattttgcatacgttcgtagttccaagaaccttgaaggaaagttgaacgtagccaaacagaaatacgatctttacgcgttaattttaattgttctgccataattgttagcctccttcttagtagttgtcgataatatcgccaagtgggtcaccagtatttgaaccgccgccattacctgagccgccttgttttgaaagggctaagtataatagggcaagtgaaacaccgattgcaccaaggccgataagtgtcaattgtgagatagtagcaagtacgaaaccaattgcgaagaatggccatacttctttagttgccatcatgttgataaccattgcgtaaccaacggcaacgaccatcccaccaccgattgctaaaccgtctgttaaccagattggcattgctgtcaacatttctttaacagggccagcaccgattgctaagattaagcctgcaggaatagcgattcgtaaaccttgcatgataatagcgatatattgccacatttcgatcttacggaagttaccttctttagcagcagcatccatgatgtgcacgataccagttgctaatgtccgtacgatgattgttaataataacccggctacggcaagaggaacagcgatagcgatagctgatgtaacgccggcttttccttggccaccaagtattaaaataattgcagatgcgattgatgccaaagcagcatcgggtgcaacagcggcaccaatgttagcccaacctaaggcgatcatttgtaatgtcccacctaagataagacaaggtagtaattgaccggttacaagaccgattagtgtacaagcaataactggctgatggaaatggaattgatctaagataccttccataccagctagaaatgcgataaaaatgaccaaaatcacttgaatgaaattcaaatccatgattattaatcctccaatttcttctgatgttatttgttattttgtttgtctagttctgcttgtgcttttttaaggatactatccatgttaccgtttgagtcacttggcactttacgaacatcgaacttgatgcccttagcttttagtttttcaaaggtatcaatatcatcttggtcaaaagccaaaacagtatttggttgcactttaccagttgagtgcgccattgaaccaacgttaattgtttctaatggaacgccaccttcaactgctctaagtgcatcttgtggtgattcaaataataacaaagcacgttccttaccaaagtgttggtcatcttttgccaatttaatcatttgatcaactggcacgacgtgtgctttgatgccactaggagcagcttgtttaattaagtttgtccgtaattcatctttagcaacgttatctgaaacaacgataatccgtgttgggttagttgtcttcgaccatgtcgttgcaacttgaccatgtaataaacgtgaatcaattcgtgccaagacatatttgaacttaccaggtgtgcctgagtttgaagtcgtttgtgcggcttctgccttaggtgcttcttctggttgtagttcttcaggtttaacccgtacccctgctttagcttcatcaatgatatgtgctgcgatttcatgagcagatgtcatagataaacgagatgcgtaagcttcaatcaacattggtaagtttaatcctgtaacgattgcccacttatctttatgtgcttcgaacaacccattagcttgattaaatggtgaacctccccaaagatcaactaagaataagacgtcatcatctgcatcaaacgttgcaacggcagcttctaaatgcgctttcaaatcatctggtccttcatttggcataaaagtaacagcttgtactttttcttgttcgccaaaaatcattgagccagattgcatgattcctttagcaaactccccgtgacttgcaataacgattccaaccattcacaaaaacctccttaataaaaatagttgtcatactcatcaataaaacgctatcaattaatataaaaaaataatggcttaaacattattgactgagttaacagttccacgtttttattttttaaaacgctttactgaattaattttaccacaaaattctaatctgtctaatcattttttagattatctgcgaaattggtctagataatcgacaaaaaagcgctaaaagtcgcattacttaagcttttataattagataccgctaatgtttgcggtgtgctaaaatcgttttttatacaaaaaagaccttaaatcgattgatttaaggtctttgctttatttaagttcattgccactcatatattgttgatatttttgttcatcaaattcgttctctgacttggcaataatgactgctgctaatgagtttcccattacgttaacggcagttcgtcccatatccacaatccgatcaatccccgcaatgaaggcgacaccagcagccggaacgccgattgtggtgattgttgctaataagacaacgaatgaagcaccagggaccccagccatccctttagaggtaatcatcaagaccaccaatagagtaatttgttgggtgaggcttaaatgaatgtgataggcttgcgccaaaaacagcgccgctagcgattggtagattgccgaaccgtccaagttaaatgaataacccgttggaatgacaaaagaagcaatcccttgactaacaccgtaattttgcactttttccattactttgggtaacgctgcttctgaactcgccgttgaaaaggctagcaccaattcttctttgaaaactttcaagatttcaaagatattgatgtgccaaatccgcgcgaccaacccagccacaacaaccacgaaaaatgccatcgttgcgtaacaaacgatgatgaaatagagcaatggtttcaaagcttcaaatccgaattgggcaattgtaaccccgattaatgcaaacaccccgattggtgctaactgcataatccagtttgtcatcttgaacataacctctgaaatcatttcaaaagcatcgatgagcggggttgcctttttaccaaaggtcgccaaccctaaaccgaacatgaccgtaaagaagatgactggaatcatttcaccagaccccaaggccgcaaagaaattcgttggcacgatatccatgatgatatcacccaagccatgatttccagcggtcttagcggctgctgtgtactgactaattgagccatgtgccaaactatgaatgtcaatcagcgctcctggtttagcaatattgccgacagctaatccgagaataattgcgaaggtcgtcatcacttcgaaatacaataacgtcttaccaccaattcggccaagttttttgatatcacccatcttggcaatcccaacgaccaaacaggaaacaacaattggtaacacaatcatcttaattaaattgatgaacaaggttccgattgattgtaagattgagatagcggtttgattatggtagaaaaaccgaccaaccactaaccctaggccgattccaattaagattcgccaacctaggctaattctaaaatatcgttgctttttcatgttttatccactcctcttgaatgccgcaaatcggcttttaaattgccaataagtccattaagtgttcaatttcgtgtgttggctgtatgtctgtcatttgatttgctagctggttcgggttataccacgctgtggcgacacccacgttctgcccaccttgcacatctgaagtaagtgaatcaccgacaatcaaagcttctgcttgtgagatcccctctaattgttggaagacactttggaaataccgtggatctggtttttgatatcccaactcttccgaaacaaaaacggcatcgaaatatgtgattaatcctgaatcttgtaaccgccgatattgcgtgttggcaaccccgttggttgtgacatatagcttaatgttagctgcttttaacgcctttaacagagcttctgcttgtggcattaaatcatggcctaatgccaagttgtctaaataattttgggacaatcttggtccatcaacttcctgattaaactgttctttaaagaaggttgcaaagcgtgtgttcaataatatttcccgggttaacgtaccttcttcatactgccgccacaagttttgattaaaggtctgataagttgtcttaattgttggagtcaattgaaccccttgatctttgaataattgggccaaagcttgatcttcatccgcatcaaaatcgaataaagtattgtccatgtcaaaaaataaataacgatactgcattgtaaatcctcatttcaactaatctaaatattgtaatttgcctctaaagtcagacagtttagtataacctttttgagccatgcttgtctgtaattcgcgcgttaaacgttcaaaaataatggggccttctttttgaagcgctgtcccaacttggaccatgctagccccacataaaatatgttcaaatgcatcttgaccagatttaatcccaccagtcccaataatttgaatggctggattcaaacgctgatagaaggcatggacattcgctaaggcggttggtttgatataatcgccaccgatgccaccgaaaccatgcttaggtttaatcacaacccgttcagttgccacatcaattttcaagccatttccaatgctattcaccgaattgacaaacgctaatggaaattgattcaaaatcgccgccatctgatcaaaatgcacgatatcaaagtacggcggtaatttaacgcctaatggaccgtgataaaccgtaaaaactcgcgttagaattcgttccaccatttcaaaatcatagcccgtttgcggcttccccggtacgttcggacaagataagttcaattccaccacacctttaaaatcagaagcactaatctgtgccaacagttgctcgtcttcttcaatattaaatcccgtaatcgattgaaagtatgtcttgtctggcactgccttttgctgttgactcacatagtctaaataataaggtaggccttcattcggcaagcccattgaattgatactgcctaaacgcgttggttgataacgtggttctggatttccagagcggggcataacggtggcactcttggtcacgaaagtccctgccattgaagcctgcacttgatttaactcagcagcatcataacaataaacccccgccgcgttcatgaaacagttatcaaagtggtacccagctagtgtcgtttcagtcgaaatcaatattcttgcctcatctctaatttgtttttaatttattatacgttaaatggcatcaaaaaaccactgtttatgaatatcattcgtaaataacgtgatataaaatccattccctcttttttaaacctaattaaccgaacaaccaataacgcagcacatataaaaatcccttggtagtgaatagagataatacttccatctattcattatcaagggattattttcgaatccattctaatcgatgacgcgctcaggattgggacttcattgaatcaggcttttttcgcttgtcgttttagaaaaataatatacccaactaagagcaccaggaatatgccaccgcatgatataccaccagttaatggttgttttttgtaaatcaacggcttggtcattagcttgatgggctttttgctctgtaatattaaaccgactcgtaaaataccactaaccgcccgacttatcagtggcggttagcttaagcatttatttgcccggcttcagcgcttcattatcccagttgatggcgtactcaaagttcgaattcggtgccatcgcaatgtctgatttgactgtccggtgaagcacttgatcagagcctaacttggtaaccaccgcatcaactttcaagcctctgatcataacagcctttgtattctgtaaattagccgtaattgctgtccgatagttaacgatccccgctttgatgtgattcagtttcagatttggcgcaataatggcatcactttcggtcactttcagaccgattacataagcgaattggttacgcaatgtcacgcgattcttttgctttttaacggtaggctgcccttcacgaacaatattaaaaccacctaataaagtacaatggaacttcttagcaggcattttaattttaaaaatggcgtccttgctactgtgagccggcaccgttacttttttatcccccgtaatcagtgaggcaatattagcaggcgccgtttcatccgcttttttctttgactggctataatcaacgaccccgttttgattagtcaccgccgtattcggactgatgttaaagatatgcacttggttatccttattttgcaccgtgatactaatcgtctcttcctgattaggtgccagccttaaatcaaaatacgttacactttgattgttttgactgctgggtaaattcgctttaacttggtaattcatactctgatcagccgcttggacggtcgttgtattcaaccacaacgcgatgccgcccattaagatgacgacgctgattctttgtaaaatatgcatccatttcatttttgaagtccctctctttaatcactttgcacatcgattaaaatttagtccgttgcagtaacgacttaacacctgcctctttcaaatttagcggctgctgccagctaattgaagcggtgtatccccaagtgtccaggtcaaatcagcattatagctgccagcataagcgccaccagcgatatccagtgtaatgccgtcagttgtcatcacatctgcccatgttcccatccctttatctttatcagcactcatcaagatttgcgcattatccaacccatcagcaggaacagtaatcgctttggctgttggtgcagcagtattcgttgaatcactagcgactactttaccgactggaaaattaatctgtgcgccttttaagatatgcgttgaatccgttgtgtctttaaattctgaacttttaacggtaatattctagccagcgccagttccccgtttatcggtgacttgtacgttaggatctttaacgatattcttaacgttttgcgcgccaccagtcagtttcaccttaccaaaatcaagtggtgttaaattatcaatcgtgatatcccctgttgcgccagttggtccgtttccgtttccatctgtccctggcacaattggtgggttagtcgttgttgtgtcccctgcttctagtgcaattttcctcgtagttgtttcattcgatgttgtcgcagcctgtacacttggtgccatcacgatatggcctaatgttactaatgataaataatcaccattttgcggtttttgaagttgtagatggtttagcgcgtacaagcgacttggtaaacgctgatatgcactatcttgtcctggaaaattataagcaacatggcctctatctgggccatcattgggtagcaaaccgtcaaaatcattgccattatggtacgtatcgaattcaacggcaaatgacttggcgattgctgagttatcttttacccaagaaaatggattccgccaaacaccaagggcgccaccggtcacttgctgccaattcttaaccttgtctgggtcattcatcattgcaaaggccatcccgtcaaccgattgcgcttttttgtcccctaaattgacatacattaaacttgtaaaattatgtgtcaaatcaatcttatactgctcttccgaccaaattgcccccttcttgttctggctatctggtgtcacttgcacaattccacctgcttgaacggaactatctaccccaatggagggtttaaagatgccatcgattggaatatgggcgggtatcgctgcttgagtacgaccactattgatacagataaacgtcaataacatggtcagcattattgcacccagcgctaattttcttctatccatcgtctacctccatatgatttttctatttttccattcatcactacacctttggtacggtctagttatcaattgggatatcaaagattcaatcaattaatcaccaattggacttaatgttttttcattctgataagctattaaattgtgtacaagttgttttaaaacgaatctgttaaatcttttaaagagataatccctatctatgattatgcaacatgtgtgaacttctttaatgccgatatttgtattcggttccatgtcatcaaaatggtcgcgctggagcttcattttatccgtaattttcatcatctaattttaatctttttataattaacattggtagaatattttcacaacaatgcctatatatcagtatttgcacccatgaacatccctttaaacattaaatttcaggcatgcaaaaaagcccccagagatgattaaataaaatgcatttaatttcctctggaggcttttttcaaatggttgtttattcagtcaattacggcattaacgaattgcaactgcttctatctcaacaattgcgccagctggtagtttaccaacttgaacggcacttctagccggtgcgatatcaccgaagaatcgcgcatatacttcattgaattcgttaaagtcatccaaatcagttaaaaaacaattggttttcacaacgttttctagggataatcctgctgccgctaacacgtgttgcatattcatgattgcttgttttgtttgactcgctaagtccggtgccaattggccatcttttaatccgagttgccctgacataaagaccagttgatccgttgcaatcgcttggctgtatggtcccaatggttcaggtgctaagttagtgtagattttctctgtcatgctatcgtccccttcacattattaaatccgttttcattgtaatgcactttaccgcctttgacaacattctttgtgtttctttgcacaaaaaaagcgccgtctcaattaattgagacggcgcgctgggggtaagatttaggggagtgtcagctgaacgacacatttaagctttagatatattgaacaatttgcatcaagattgggacaacaaccacgaataagacggtacttgttgtgacaacgttcgttgcatattcaacgtcaccatgtgattgaccaactaagattggtaagacagccaaaccaggtgttgcagcttgaataatcaatgtgctttgttcgattgatggaattgaagttgtgttcttgaagaatagcatgatggcaatcatgatggctggtgccacaacgaaacggcctaataacgcaaggactgtatcgcggtcgaaatggattgatttcaaaccagcatcagctaagataatcccaatgtagatcaatgacattggtgttacgatgccaccgaccattgagaatgtcttatcaacaagttctggtaatggtaaaccagttaaaagataaattaatgcggctaagaaaccgattaatggtgaaggtaataatttacgccagttaaatttgcctttagcagcgcctttttctttggttggatcatcatttgagatgaagaagaccccgattgcccatgttgaaaccgtattggccacatagtagatcaagaagtaaggtaaactcttgtcaccgaatagtgccaagttcaatggtaacccaatgaagatggtattagcattgacgaacatattgataaatgtccctcgacgacctggccgaatccggaaagccttggttagtaaccatgccacgagataaccgagggcgaaactaattaagacgtagatcaagccgccagataaaccgaccaacttttcacgggttaagttatctaatactgagacgaaaattgataatggtaaagcgacattcatgattaaaaatgaaattgtgcctttaaaattatcatcgaatttttttgaactccgtagccaaaaccccaatgcaatgactaagacgatttcgacaacgcttgataatgatgttagaaatgctgccaactctttcacgctcctaccgatttatatttaaattatagtgctttgtattctggttcccatttcatgtctgcgacggctttttgcacgtcagcaattggttctttattcaaaccttgatcaacagcgctttgagcaacagcgttcgcaaccgtttgtgagaagatatctagttttgtcacaggaggcaagacagctgcgccaggttctgttggatcaacaatgccacccaatgagtgagctgctttgctaatcatttcgtcatttaagactttcgcagtggaagcgattgtgcctaaaccaagccctggatagactaaagcgttgtttgcttgaccgatttcatatgtgacaccgttgtattcaacaggtgcagcaggaatcccagtcgctactaaagctttgccgtcagtccacttgattaagtctgcagcagctgcttcagctaatttcgttgggtttgacaatgggaaaataattgggcgttctgtgtgagcagccatttccttcacgattgattctgtaaaggtcccaggttgggttgaagtccccactaaaatggttgggtggattgctttgacagcagcttctaaagttgttaattcatcagcattcgcgaattcactccgtttgcgcgcaaatggtttttgttctggtgttaattctggatcatcatcaaacaatagcccttgcttgtcaaccatgtagaaacggctacgtgcttgttcttcagttaaaccttcttgtaacatttcttcgaagatgcgatgggtaatcccagcacccgcagtcccagcaccaaagctcatgtaaacttggtcggtcatcttgccaccagagatatttaaagcgcccataatcccagctaatgtgataatccctgtgccttggatatcatcattgaacgtcacgatttgatctttgtacttgttcaaaatattagcagcattgctccggccaaaatcttcaaagtgaagatacatattagggaataggtcttcagctgtttgcacgaattgatcgacgaaatcgtagtaacgatcgccgcgaacccgttcatgacggttgcctaagtataactcatcattgagtaagctttcacggttcgtcccagcatctaaaacaactggtaagacttgactaggatcaatcccggcagcagccgtataaaccattaatttaccaactgagatatccacaccttgtgtgccccagtcgccaatccctaagattccttcgccatcagtcacaacgattaatttaatttcgtgaccatcagcagcgtttgccaaggttgtcttcattgaatcaggatcgtcgattgataagaaagcagcgttttgggggttcacatataaagcactgtagttttcgattgtgtcagcgatcgttggatcgtaaaccactggcatgaattcagcaacatgttggctgaataatttaaagaacaacacacggttttcattaaaaattgacattaagaaaatccgttgttcaagcatgttggcttttgattgatattgggcataagcttgtttaacttgttcatcaatggtttgcacgtgaggtggtaacatccccgttaaaccaaattgtgcacgttcttcagtggtgaatgctgtacccttatttaaaaatggatcatttaaaatttgttgtgctttcatattaaaaatctccttttcttttatatcatgttggtcactatacacgcctcaacatttgatagtcaaaacttacatttatgataaaatagatttatatgaaacgtctaaactgcattaaacaggagtttttatgaagattaaagatttggcctattttgctgcgctaattaaattaaaaaattttacggcagtcgctgatcaattcaaggtcagtcaaccgacgatcacttacgcggtcaaacgccttgaagatgaattcgcgaccaaactcattcagcgcgatcaatcacaccaatcattgattattacccctagtggtgagcaactttatcaacatgccgcgcgaatattagcggagattgaactaacaaaggccgacatgctcaatctcaacgctactgatttgcgttttggcttgccaccaattatcggcacttactacttctcaaaattagcacaaaagctagccgctaacggcacgattcaacattttaagacagctgatgggggttccaaagaattgttggcttcattagaagccggtgaactagatgtcgcgcttcttggctctgcgacgccacttcaaaccgataccatcacagctaaagtcatcgaacgtcaccattttaagattgtagttgcacctgatagtcccttagcccagaaaccagcggtcgcctttcgtgatttagcccacgagaaatttattatgctcgcggaaggattcgtgcatcccgtggtcttcaagaacttatcggacgtcaatcaaatcaaacccgaaattatttaccgcaccaatgacgttagtgtcttaaaaagtatgattcacgaaaatgtcggcatcggttttctaactgaaaccagtattacgcctgctgatgacttagtggtacttgatttattggatgaaccacaaccaatcttttatatctcgttagcctatcgtaagacccagttcttctcaccaaaacaacaagctctcatttcgaatctcgaacaagcagcgcgagactaccgtcttgaacattaaaaaagtggtggcgacaaaattaatttttgtcgccaccactttttaagtatgttttaccataaaaacgctaagacagtttgattgactgcatgattttcgtgtaattgactatgctgcgcttttttaccagtaaacttcttttcttgataggtcttcgcaccaggcgtcaccaaataccgcaacgactgtgacgatgcattactaacacgtccgtcagaatgcgtcccatcgcctaaatccccatagatattcaacaccgtaatcgatttagcagggagctggttacgcagtcccatcagttgccgataagtcgcgttcattttttgtggttggccatcctttttaacctggttttgattaggctgatcatccatcccgataatcccatcaaaatgacccgcaatattcaccatcttcgccatacggggtaactgtttatcaatcgcatggttcaataaataataaacggccgtcaagttgcccatcgaatgagccaccacgttgaatcgtttgaagctgtgctgccgattaaccgcgactaagacgtttttaaaccactcaccatcttgttgatagttaggattgcgattatcttcgaaaacaacttgcacgattagtcgtgtcgttttagctaaccaacgcccctgtaaatcaactgaaccatccttacgaacggttgcagtgaggacctgtgtcgcattcttttgttcgcgagcagctttgatcatgctatcagtcgaacgagccgaaccgccataaccatgcaaataaaaagtgggctgttcattttctgtttgcttgacttgctgcgctttttgcgtcgttgcattccctaaaagccaccatccactgccaattaaaactcctaaaccaatgatgattattatccatttagaacgtcgcatgcgcccgaatcccttcgcttttctaattacgcctatggtaccataccattcataaagggtgtcaattaatttagcgtaagttgatcaaaaaaataccccgggtcaattgacccggggtattttgctattaatggtaataaattgtaattaatgttaccagcccaaatatgattcctgggacatttgaaatgatgattggccaatctttatctggtttaaaccaaccgtaactaaaccacaaagtcgcattaaccatcgcaacgcttggttgaatcgccgacacagggtgcccagctaaattagccataatttgttggatatatgacacgtacatcaagaaacatgtcccaactgccatctttccaagccaagccagttgattgcgattactatgaaccgtcgctgttttttgatacctaatcgttacatcttttgttttcatcttctacctcgtcactagtcttcgacagttatagtggctacgcgatcaattaaatgtgtcccatattgaaaagcattggcataaattgttagcgtcccgtctaaaacctgctcaaactcaaacaacgcttgattatctaaccaagtgatgctagttacgcgttgcggatattgattaaacactatcttccgcgccttttcgccacccagcacaacattactattacctatattacctaaaccatagacaaacagatagtttcctttgataaaatcggttgtctcgccacttgccaagtaggtctgattttcataatgatttgtcgcataaattgcttctccataaactgacatccattgtccgacaatcttcaataacgactgtgaaaatgctggaatggcaccgtcaaattcaagcccggtattaattaataaattagcaccgacttttctggaattacaaatttgatcaataagttgcttcggtgacacatagttaatgtcatttttagcaaccccccaatgcttatttattaccaagtccagttgctgcgcgtgctggcggatcttcgggtggctctggtggttcgggtggtagcggtggtgggtcttcaccgacatccagttatgttggcggccgtagtcgtgattattattacgatgatgcgggatgtcggcattactacaagtccccaatgcgtcgtttattcgatagtatagtcaccctgcctttcgtattcgtctcccttgggatcatgatttggcgtaaagtgcgtgactggttaaccggacgtagaaaacgggcactggctgataccatgccgttagatgctgaaaccgcggcgcgctttgaaaatgcattctatcaaattgaaacagcttggccctcaaatgacttaagcaacgtggcggacttaatgacgccccattttcagcaccaacaacaacgcatcttaaaccgttatcaacggcaccataaacataaccaacttgagagtatcgccattgtttcaactgagttattattacctgaaaaaccgaaccgccaagatattctagtgacagcgcaaatgcgcgattacttcactgatgagcggcagacagccacggttaatgaccaacgtcgtgaagcggcttatattgaacgtttcagcgaaatttgaacgtttaaattaattgatggtcaatatcgtgtcgctcatattaatcaatccctataaaagagctaccagttggtggttcttttttgttatttaattggttaagtttattgcgttaaacaactttttctcttaaaatagaccttatcgatttaaaaattgtttatccattttgattagaaagtgaggtcatttgatgaccctccatgttggcactggccagacacaaacggccgtttccttaatgccgcgtaacctagacgattgtgtgcgtgaaatggcactcgttgagcaaaagcaagctgcgattgatattctagaatggcgcttagactattggcaaacaccagcgaccttattaacggctggtcaccaaattgccgcctgcaagcaccccgttattttaacgctcagaacaacccatgatggcggcctgtctgatccaaccgactatttagaccgctatacagctctattatcggctcaaatcggcgatgtggttgatattgagtggtctttacctgaggcagttagaaaagccgtcagcgcgcttgcacgtgcgaatggctatcaagtgttactaagccatcacgatttaaagacaacccctgataatctaacacttcaaaaacaactcgcagcaatgcatgcgacgcacccagatatgttaaaactagcaactaccgctcaaagtaatgaggatactactcggttaatggcgattacccagtcttttacacatgatcacacaaccccactgatcacgatggcgatgtctgaatttggcttagcctctcgcatttttggtggtcaattcggttcagctgtgagtttcggttaccttgaacaccccagtgcaccaggccaattacccattgaacaactcaaaggcttgttgacaatgcatcaaaattaaccgcacaaaaaaagccccgcacaaattcaatttgtgcggggctttttagattgttgattagttccgttcaacgtttaaatcattcatcttaagcattgtatcaacggccttttccattgtttcgattgaaacaaattcgtagcgaccgtgcatgttttcagcaccagcaaagatgttaggggttggaatacccatgaatgaaatcttagaaccatctgtcccaccacgaacaggttcgattaatggtttgatatcaacggcttccattgcatctttagcaagatcaacaacgtccatgtgatcttttaagacttctgccatgttgtagtattgatctttgattgttgcaacaacgcggccttcaccgtatttagcattcatttgatcagcaactttagcagcaaatgctttgcgttcttccaaaccatcacgttcgaaatcacgaatgatgtaagccatgtgtgcttcatcaactgtgccttcaaggcttaataagtgatagaaaccttgacgaccgtctgttttttcagggacttcatcgcttggtaaagcattttggaaatcaacagccacttgaagggcattgatcatgatgtttttagcttcactaggatgcacgtttttaccttgaatatcgactttcatggcagcagcgttgaatgtttcgtattcaagttgaccgattggaccgccatccattgtgtaagcaaagtcggttgcgaaatctttggcatcaaagtgatcagcgccagttccgatttcttcatcggggccaaaaccaatcttgatgtcgccatgtttgatttcaggatgttggactaagaagtccatggctgtcatgatttcagcaaccccagacttatcatctgaacctaataatgttgagccgtcagttgtgattaaagtttggcctttataatttttcatatttgggaattctttaggatctaatacgaatttacccgcatcatctaatttaataattgattcgccatcatagttttcgacgatttgtggattgacacctttggcattgaagtcggcagtatcaacgtgtgataaaaagcccattgttggcacttttttatcaatattacttggtaatagcgctgttacatagccattactttcgttgtatttcacatcacttaatccgatttccttcaagtcgtccatcaatttgtgtaaaaataccacttgtgtttgggttgatgggctcgttgttgcgttttcatctgaacgtgtttcagttgtgatatattctagaaaacgaggaatcaatttttcatatttagccatggtgtagcctcctagatattatttaatactaattctattctaacctacttcgcattaaaaataaatgtaaacggatcagttttttgctgtgatttaatgaatgtaaccgaccaaccacgctgtttggcccacttttcaaaaattcctgtcatcttatccttcacaatactttcgacatgatgaccaggatcaattactgacaaaccagctgccaacatatcgtgaccagtatgataatacacatcaccggtaatgtagacatccgcaccagcttgtaaagcggctgggaagaatttacccccatcgccaccgacaacggcgactgtctgaactattttgtccggttcatttgaaattaagcgcagacctgttaaatcaaatgtttcgcagacaaattgcgcataatcccggaccgtcattgattgagcgacttgaccaatgcgcccaataccaatcggttgttgttgattagctaatggaatcacatcataaacgggttcttcataaggatgcgccgcaagcatcgcctgaacaactttggtttgcatggccactggcagaacaacttcgattttaacttcggtaaccgcttctagatcacctgattggccgatataaggatttgctgcgtccgttggttgaaaacgccctattccggtcgtactaaaactgcaggcttgataatcgccaatatgtcccgcatcagcttgattcaatgccatccgcatctgttcagcatgtgactcagggacaaagaccaccaattttactaatgattggtagtccgtgatgttaaacggttgcacatcgtttagttgtaaagcttcagctagccaatcattcatgccgccgttagtcttatccaaattcgtatgggcggcatataccgtgatgtcatgcgttaacagatccgcatacatcttgttttgcggatcacttagatcgagattccgcgctgggcgaaacattactggatggtgggcaaaaataaaatcaacattctgttcaatcgcttcttgaacggtttctgggcggacatcaagggttactaacacccgttcaatgcttttatcgcgtcgcccgatttgaaaaccggtggggtcattgccttcttttaatgccaatggtgcgtagtcttcaatcgcagcaattaagtcactcgcgactaattttcccatgtcttcatctcctcgattaatgcaatttcatgttcaactgctttgactttatcagtaggtacgacttgtgcgttttgtaattgttgcaataaatgacgccgttttttcaacattgtcccccacttcaattggaaatcagcaggttgtgtttggcggagaacagggccaaacactcgatcactttcgcttaatggtgcaactgatggttggggttcgccgacaatcacttcgtagatatgcccgtcttcagcgacaatcgcttcatcaacgattgcatagtcatgtgcattcaaccattcacggacagtactttccatgatattgggttgtaacacgagtcgttcatggccgttcagatgatccaatccacgggttaaaatttccgtgatcaataaaccacccatgccggcaatcacgatgcaactcacatggtcttcttcaggattcaatacctcgacgccatcgcctaagcggacttgaatctgttgttgtaagtgccattgattaacgtgagtctgtgttgattcaaacggaccggcaactacttcaccggcaatggcgcccttcaaccggttttgttccgtaagccaaattggtaaatatgcatgatctgaaccgatatcagcaacaatgctatcttgtgggacaaactgcgcaaccgcagctaaacgctttgataaatgaattggtgacaaaaataaaactccattctagaaactttgattgttatagttagtataccaaattttagacggcatacgcagtcaaagtgaacacttgattctggatagcagaagttgctttaggcaaaatttagttttatactgaaattaaatcgaaaacgctttctatacattaaggagtggtctcatgagttggttgcaactattctgtgttttcatgattggtttaggcatttttcaaatttataagtcgtatcagtattatcaagacttaaaattacacgcagatcaaaatacttctgtctttgcgccagcagcgctctgttcgagtgctttcatggggcttgtctttattgggattagtcttgctagtttattgaattggttataaacgtcaattagccccttctttttgagctttattagttttcggaaatcctagttaacataagataaattatttacagtgaaggggatggtaacatgaactggttaccaattattgggattttaatgctaatcatcggtattttccaactttcaatgaccattaaaacattcaagactttgaaggttgaagcaaaccacagtacttcagtcttcatacccatggcgttatggtcatgtgcattgatggggattgtatttttagcagtggggattggtgctctgcttgtttagatacacgcaaaaaaggccgcaagctaggttagcttgcggcctttttattgattgcctaaacgtgctttttagttcaacaacttccgcttaatctaacattgccattaattctaaaatctgaattaatgacaatattgtattgatgctcagttgctcccgtaactaaacgcactttatcgaaaacgtgctctagcaggcatatttctgcggctagctacgtcagtcaaacaaccaacatcgttggttattcgcctgactatgctaaccctcaaaatatagccgcctgcttacgcactcttttattctaaaaagtcttttaattgttttgaacgtgatgggtggcggagtttccgtaatgctttggcttcgatttgacgaatccgttctcgcgtaacgccgaacaccttacccacttcttctaatgtccgtgtccgaccatcatcaaggccgaaacgtaaacgtaagacgttttcttcacggtctgttaaggtatctaggacactttctaattgttctttcaacaattcataagaagcatgttcttcaggactggtggcatcttgatcttcgataaaatcgcctaagtgtgaatcgtcctcttcaccaattggggtttcaagggaaacaggttcttgagcgatcttcaagatttcgcgcaccttatccgtattcatatccatttcagcaccaatttcttcaggcgttggttcgcggcccaaatcttgaagtaattgtcgttgaatccggattaacttgttaatcgtttcaaccatgtggacaggaatccgaatggtccgggcttgatcggcaatcgcacgcgtaatcgcttgacgaatccaccatgtggcatatgttgagaatttgaaccctttacggtgatcgaatttttcaacggccttcattaagcccatgttcccttcttgaattaaatccaagaattgcatgccacggccaacataccgtttagcgattgaaaccaccaaacgcaagttagcttcggcaaggcgttgcttggcttcttgatcaccttgttcgattctcaaggctaagtcaacttcttgttgggcgtttaaaagagatacccgcccaatttcttttaagtacatccgcacaggatcgttaatcttaatcccggttggtgcagtcatatcttttaattctttagcagaaaccttttcctttttaagggtagcggcacttggattcccatcttcatcgacaatcccaatcccttggtcttccactttttgcattaattcattgatttcatcagcttgtagcgcaaatggtttcacgatttttgcaacgagttcatcattggtgatttctttctttggtttgtattccttaattaaagccttaaccgcagtatcaaatttcttcgtgtcagcttttttattatcagccattcagaaacctcctaatatcaatttcctaatttcttttgcgaaacaagtctaatgacctccagggttaagcgcgtttcttcgctcgcattccccaatttggtcgcctcttttaaggcaattttcgcttctcttaattgttcctcaacgttattttgcgcaatgacgaacagacagtcgtttaacgcctcttgacttgcctcttctggtaagtcaagcgcatcaatctgaacgactaaggcttgtaagtcatctgggatataacccatgaagtcggccaaggtcgacttaccttcagctaaaaaggcgcgccataactcgtaaatcagttggtacggggtatgcacaaaactaaaatcggcattgttctccaattgcaggcgcatatcgtcattagccatcaacatatgcaacacttcttgctccgcgtgttcaacccgggttagccgttgtggctgacgcgtcgctgttgcccgcggatcaccaatgattggcggtggtccacccacaaatgcgtcatccggttcaggtggcatgtcataaccatactgactagatgccggtgcaagtggttgctgcgttgcccgtttaacgcgcaatgtttgtaactgccgcttcaacgtatcaagggtaatgccgctatcggcttcaatttgcttgaggtaaatctcgatttcaagcggcgaatcaattggcgcaacgacggacaatgcctgttgcacgtaatcaagttgatccttctcgttatccagatttaacccttgcttcaaataccgcagttcaaatgcaatcggtgtttcagcaccattttgcaaggttgtcttaaattgttcagcaccatattggcgaacatattcatccggatcagcgccactgggcaaaaccaccacactcaattcaagcttggtattttgctgcaacatggtaattgcgcgtttcatcgcttcgattccgggacgatcaccatcataacagacaattaattcccgagcctgttgccctaaaattcccaactgctcagtcgttaaactcgtccccattgaagcgacaccgtttgaaacaccggctgaatacgctgcaatcacatccataaacccttcaaacaggtaaactttgcgttcttggtgaatagcagtctttgctaaatcatagttgaacaaaaccttccgcttgttaaaaatcacggtttcaggactgttcaaatatttgggttgatctggttgtttcaccaaaacccggccagaaaaagcaatcacttcaccttgcgcattccgaatcggaaacatcactcggccggaaaaacgatcatgcagcttgccggtctgagtttcaataaataagccggattgacgtagtgtctggtacggaacttctttattctggaagaatgaaagcattaaatcggtttgatccggtaaatagccaatactaaacgtctcaattaattgatccgtcaagccccgttcgtgtaagtaatctaacgctggttggcccgcttcagtactcattaaaatatgcgtaaagagttcattggcctgacgatagagttgcttaaactgcgtcacttcacttgattcttgaacattttgagtgggtcgataagtctccgctaaactgaagccgacaaagtcagcgatttttgtaacagcttctggaaaactaatctgttccagttccatcaagaacttgaagacattcccaccccgtccgcaagagaaacaatgaaaaatctgtttctcttcactaacggagaatgatggggtcttctcatcgtgaaacggacaaatcccaaataggttattgccgctcttcttgagctggacatactgaccaacaacatccactatgttagtttggctccgaacatcatcaatcacgtcattcggaatctttcccgccattggtctcacctcactattcaattcaaattgtactaagactgtaaaagccgcacctcacaatgaaatgcgacttttaaggattatcagcacaaaaatacactatatatcatagcaccatttaggtacagttgcaaataaatatagcaaactatctcattcgttgtcaaggtcctttttcaaaagtcccattaagatgacaacgtgattatattgcaggtcctttgccgcatagactaacgtgacgttgcccagctcaaggtgctcgtgcactaccttttcaaacgccggccaagctggattagctgcaatttcagcaaggtacttttctttaaaaacgggaaacttagctggctcatgaccaaaccacttgcgtaagtcagtcgttggggtaatttctttcgcccaggtctcaatagtggcacgttcttttgaaatgccgcggggccaaatccgatcgactagaattcggtacccatctgagtctgtcgctgcttcataaacccgtttcatttgtaacatgctattatccccttttgaattgtttatttaacaatcaattcgtttaaatcacctaaggtaagggcgatttgagcgataatcatcaactgtgttaagcgatttcgacgaacagcttcatcttcagccatgaccattgtggcatcaaagtaagcttcgattaatggtcgtagtgtttgtaagatgccgtaattatcagctaatgggttcgtagcaattgtaccacgtaagtcttcgaccgctgtgtaaagtgctttttcagcttcattttcgaataatgcaggatcaaccgttaaatcagttgttgcaaagtcaactttttcagcgagtcgtaacacacgtgtcacggcttcaaccgttgccttgaaatctgcatcatcttgatggtctgaaagcactttggcagcttcgaacatcacgactggatcttgactttgattcttcaagacggcatctacgatatcacgccggactttaggccgcatgccgttaaagcgttggcgaacacgatccgttaagaaatcgctgatcgcgtcagcattggttgaccaatcaaggttgaaatcagcttgttgcttaacaatgtcactcatcgcagcttgataatcggccattgggaagtgccagttttggttttctaagatgcggataatcccataagcttgacgacgcaatgcataaggatcgtttgaaccacttggaatcatgcccactgcaaagaaatcagccatactatcgaacttatcagcgattgctaaaaccgcgccgacctttgttgcagggagtgcaccttcagcactaattggcatgtagtgttcgcgaatcgctgtggcaacggctggtgtttcaccttgtaataaggcatatttttcacccatgaccccttgcaattcggcaaattcaccgaccatgccagtcactaagtcaaatttataaatatcacttgcccgttgcaaatcaactaattctgcttctgataaaccaaatttttggcctaagaattgcgcgattaaaccaacacgggtcatcttttcagccagactaccaatcttgtcgtggaatgacacgttttgtaacttcgcaacgttttgttcaatcgttaccttttgatcttcatggtggaagaaatcggcatcttccaaacgcgctgtgaggactttttcgttcccagcaatgacattttccatgaagtcggtgttcccgttgcgaacaccgatgaaaacaggtaataaatcacccgcttggctgcgtgcgtagaagtaacgttggttatccttcattgaggtaatcaacacttcttctggaatttcaagatacttaggatcgaattgcccataaaaagcagttggccattcaactaagttcgtcacttcttctaacaagtttgcgtctaaatcgacttgccaatcgttttcttgggccattgtttcaatctgagtttgaattaagttttggcgtttagcttcatccgcaattacgaattgtgcttccagcgttgcttcgtaatcagttgcttttgccaatatcacggcttgacctaagaaacggtgcccttgtgttgtgcaaccagtcgtaacgtttaaaatactgaaatcgataatttcatcgtctaatagagcaacaatccagtgaattggacggatatattcgaagtcgtaatcggcccagtgcatccgcgttgggaaggtcatcgccataatcacggcttttagttctggcaaaattgtttcaacaggtttgccgatgattgatttttcaacatagacgtattcaacgccttttagtgctttaaaagtaatgtcgtcggtcgttaaaccttggccgcgaacaaaaccttgcgctgctttactccagttaccttcagcatcaagcgcaattttcttagcggggcctttcgcttcttcgtgaatgtcagcttgcttgtccgctaggtcttcgatcaagacggctaaccggcgtggtgttgcgtaagttttgatggtcccgaatgttaagtgttgttcttctaaaaagtcgcgtacgcgcttttctagttgttggatgctaggcatcacaacgtgggctggcatttcttccaagccaatttctaataagaatggtttagtcattgttaacgacctccgtgtttgattcttgagcatgttttaagagcgggaagccacgtttctcacgttcagcaacgaatgcttgcgcgattgagtgcgccatccggcgaatccgtgacaagtaaccggcccgttctgtaacggaaacggcaccatgggcatccaataggttgaatgtgtggctacatttcaagacatagtcatatgctggatgaacaaggcctaagtcaattaaacgttttgcttctgtttcgtattcatcgaagaatttcaaaaacatgtcttggttactgtcttcaaaagcatattttgaatgttcatattcaggttctttaaaaatatcgccatataacacgccattgccccattcaagttcgaacacgttgtcgacatcttgaatgtatgaagcaagccgttcaacgccatatgtgatttcacttgtcacaggatcgcattgcaaaccaccaacttgttggaagtaggtaaattgagtcacttccatcccgtctaaccaaacttcccaaccaacaccggcacaacccattgatgggttctcccagttatcttcgacgaagcgaatgtcatgttccaaaggatcgatgcctagagcccgtaaactatccaagtaaaattcttggatgtttaatggggctggtttcatgaccacttggaattggtgatgttggaataaacggttggggttttcgccataccgaccatctgctgggcgccgtgaaggttctacgtaagcggcgttccaaggttctggtccaattgcccgtaagaacgtgtatgggctcattgtgccggcccctttttctgtatcgtaagattgcattagcatacagcctttttcagaccaaaaacgctgtaaggttaaaatcatttcttgcacatttaactttttaaccatttcaattcctcttttccgtattttgcgcataaaaaaagcctatgcgactgttaagtcacatagggacgattactcgcggttccaccctacttcagctcaaagcgagctgctgcttcattggtatgactccgaaacgccaatccactcaagtcttgttctagttctcactcacctagaatcactgtctgaccgtcttaagggacccttttcttcaacgtctattaagttgattactattttagtcgtcttttggcgtgctgtcaatttctgacgacactttttttaattgtggtaattgactatcgaaactgtacatcttatcgatgaattgcttactcttgagcgataggcaaaccgtgtcttgataaatccggtcgatcatcgtcttaagctccatctgcgttgtctgtttgacgttgaccgattgaatcttgaataaatcaatcactgaaaaaagacgcagataatagatagcccgttgactaccgtggaatcgattaacatccaagtgccagtggcgttgacaaagcagcccgccataactctcagaataatcaaacggcaaatcagaacgcccacaaaccgcacagacttgcagttgtggctgcaccccgaagacttgtaacatctgaatctcgataatgtgcgtaatcatcgccgcgtcaaagccttcatcgattaatgagagtgcctgttcaatcttcggataccaactgccgagcggttcgctatccggaaaaccaacatcgactaagcctaagatataggtcgcataggcatttaaaaacaagtcattgctaatcgattgaaactgactcgccgacttgacattatttaaaaaggataagccatcatcgcgaatgtcgccaccgtactcagcttgggtaaatggcaaaatagccgcactcaagcgaaacttcggtttattcgcaccgcgtaagtaaaacatctttttgccaaagcgatcggtcaaaatcttgaccagcatatctttttctttatagttcttccgatacatcactagaccattaaagtcttcgaatcgatgttccgccattgcttaagcctacaatctctttttattgtaaccaaattcacggaggtattggttattgtcacgccaattcttttgaatcttaacccagagcttcaagttgactttttcgccaagtaaagcttcaatttcgcgacgtgaccgaatcccgatttctttgataatggagcccttttgaccgatgataatccgtttttgaccatcacgttcaacaatgatattcgcttcaatctggagcttaccattgacgcggtctttcatccgttccacaaccacggcaacagaatggggcacttcttcatgcgttaattcaagaattttttcccgaatcaattcaccaacaacgaaatattctgggtgatccgttaattgatcttctgggtagtattgagggccttctgggagtatttgttccaattcttttaacatttcagggacattgttaccttctaatgcagagattgggtaaacccccttgaaatctaattcatgccgatattgttcaatcattggtaataaatcgtctggatgaatcgcgtcaattttgttaacaaccaaataaacgggttttttgacgttcttcaattggtccatgatgtattgatccccaggcccttttttatcaatcccactaatcatgaataaaatggcatcaacttcgttaaacgtcgatagcgctgcttgatccatgtattcatctaattcattatgtggtttatgaatccctggtgtatcaacgaacacgatttgcgcgttgtcatccgtgtagatcccttgaattttattgcgagtcgtttgtgcttttgatgacatgatggcaattttttcaccgatcattcgattcataaaagttgattttccaacatttggtcggccaacaatggccacaaagcctgagcgatatgtttctgacataatagtcccctttttagttaaatatggcgtgtccaaagacaatggcgccaatcaatagcgctaaaattgcgctgattaagacactggctgcactgatatctttaatctgcttagccaatggatggtactggtgatcgactaataagtccacgagatgttccataactgtattccaaaattcagccataaaaacgataaaaatcgcgaaaataatcgctaaccaatctaaataatgtaactgacaataaataccgaaagcaatcgcaacgagtgcaaaccaggcatcacgccgtaaattagcctcagttttaaaggcggtccataatccaccgagtgcgtggcgtagtgactgccaaaaatgtttattcttgcccgtttgtggttttttaccgttgtaatccaaattcatcgaggatcttctcctgtaatggaatcatttgtgcttcatcttcactatgaatgtgatcataaccatttaagtgtaagaagccgtgaaccattgtgtaccctaattcacgttcaaatgaatgtccataagtttcagcttgttcagctgctttttctaatgaaacaaacaaatcaccgatattcttgggaatgtcgaatagttcttcaaagttggctggtaatccttcttcttcaggatcttcttcgattgcaaaactgatgacatcagtcgcacggtcagtatcgcggtattccttgttaatttggcgaatgcgttcgttcgtcacaaacgtgacagacatttctgtgtcttcaggtaaatctaattgttgcccggcatattctaaaatatccgtgaccagttttacgtttgcttctgcaactacttttgtttcatcgataatttggatatccattcaagtgttcctactttctcatcttttcaatcgccgcataggcgttaataatcttagcaacaactgggtgccgtaccacatcttctgaactgaactgtacgaaagcaatcttaggaatatcgtgcaaaatatgttcagcttgcaccaagccgctcattgttttcttaggtaagtcaatctggctaatatcgccgttgacaatcatcttcgagttaaacccaagtcgcgttaagaacatcttcatctgagcaggcgttgtattctgggcttcgtccaaaataacgaaagcttcttctagtgttcggccacgcatatacgcaagcggtgcaatctcaatgacaccacgctctaacaaacgttcagtatgttctttacccaaaacggcatacaatgcatcataaatcggtcgtaaataagggtccaccttttcctttagatcacctggtaaaaagcctaaactctcaccagcttcaaccgcaggacgcgttaaaatgatccgttcgactaatccttgtttcaacgccgcaacggccatgacaacggctaagaatgttttccccgttccggcggggccaatcccaaacgtgacatcgttttgacgaatcgcattcacgtattgacgttgaccgaatgtcttcacgcgaatatgctgccctttacgatccttgattaatggctccgtgtaaagttcttggaaaccagcaatcgtgcctttttgggccatcttcgtcgcactcaccacatcactactattgagcttaatgccatgttgtaacagcgccactaagttttctaaaacagaagcggcttggtcaactgctggttgttcgccgcgaatggtaatatgctcgtcaaacgcaatcagttcgacagataagctttcctcgatgatttttaaaaaagtatcgtgtgtgcccattaaagcggccgctaaatttggcgttgccaattgaaataaacgctcatctgtttcagccaacaaagataactccttccagagtgtgactgcaactgattctgagtattatctagcccagaaaataaacgactttagtcgattattaactacacgtcgtaaagtgaagaatcaagttgcaaccgcacgtttcaacttcatttgttttagaatgaaaactaccatcattctatcacaaacaacaaccgttttaaaagtagccagccgcgctaattcacgaatttatggtcaattatcaaaatctgaattaacgaccataaaaaaaagcgggactccccagaggaagtcccgcctaaaattaacttaattttgatttaacgacttgattgaccatagcgccatcagctcgtcctttgaccttaggcatgacatattgcatcaccttgccaaagtcagccttacttgtcgcaccagtagcctgcattgcttcgtcaacaatggtgaccactgctgcttcatctagctgctctggtaaataagcttgtacgatttcaatttctgcttttgtttgttcagcgagatctgcacgatcgcccttttcaaactcagctaatgaatccttacgttgcttaagttgtgatgatagtacacttaattcttcgtcagaagataagtcttgccccgcactaattttggcgttagttaaagcggtctttaaactccgaataacagctaatcgcaacttatctttggccttcatcgccgttttcaaatcagaacttagttgttcaagtaaactcattcaatcatttcctttatctaagaaattagaacttcttacgttttcttgcagcttctgatttcaacttacgttttacacttggtttctcgtaaaattcacgtttacgatattcttgtattgtaccagcttttgatacggaacgcttgaagcgacgaagagcatcatctagagattcgttactgcgaacgactgtcttgcccatatgatatccctcccctcgcgtgctaagtataaccgtttacgttcgttaaaaatttaacttcacgtgaaccgttctttgctattatagcgaatgttgaaaatacggtcaataacccacagggaattaattgaatattttttcaaatctagcgattttttcgataattatggtatgatagcgctataaaagtgaataaaggagcatgccttatgccagaatctaaaccattaaccgtttttgtgctttcggactcagtcggccaaaccgccctccaattagcacaagcagcgctcgcccaatttccggacgttaaacctgatctcgtccgcttccccttcgttcacacgcaagagaaactcatggacgtcttaagcaaagcggttcctgaagaaacaattgtggtccatacattagccactaacggtctttctgaaatcgccgaaacctattgccaagcgaaaaaaattgccagtttcgacatgatgtcaccaatgacacaaatgattactgctaaaaccaacagcacgccaactggtgaagctggggcactacatcatttgaacgatcgttattttgatcgcatttcagcgatggaatttgctgttatgtacgatgatggtaaagacccccacggtttcttagaagcagatatcgtgttgctcggtgtttctagaacgtctaagacgccgctgtcgctctttttagccaatcggaatatcaaggttgccaacttaccaatcgtgccacaagcgcacattccagacgaaatctggcgggttgatcctaagaaaattatcggcctgatgaatacaccagaagtcctcaataacattcgccgggaacggatgattgcttatgggttaaatcctgataccacttattcagacatggacgaaattaaagctgaattggctttcgcccaagacctgtatgataagattggttgccaagtgattaatgttgccaaccgttcgatcgaagaaactgccacaattattcttgaacgcatgggcctcgattttgcgggcagtgcgaacgatcacgtcaattaaaaaaagcgttcaaatctgaaatcgatttgaacgcttttttaatttgttaatgtttaatcgttaaaaaactcgcaaccgaactacgctgcgaatgaaacgcattaatcatcccttcactacggtaccccatggcaatcccaccaatcaacagttcattttccggaatacctattgctttgcggaccgcatctggatacttggccgtttcataggcaggaattgtatcaacttgttcgttagccgcggctaacagaatcgactgactaaaagcccccatgtcataaatcatccatggcgaaactttgcgctcaaccgtcaagtaagtcacggcgggcgcgttgaacagatggcgttgtaaatcgctaaaattcgctaacccgtcttcgccaagataggcactgatttcatcattccacacgcgactgttctcagccattaacggtccccagtctgtccggtgaatcacgtttaaatcagagtagcctttcatccggtttcccgttcgttctaaatgatcggctaacgtttcacccgtcgctacatagactttccaaggttgtgaattcgtccacgacggtgttcgttgggcggacaccattattttttcgattaattcatccgagatcggtttgtttgggtcaaatgaccgaattgccttgcggtgattaaccacatcgttaaactccatgtgctttcctcctccaactaacacttatttagcgcgttaattacattttaataacgctcataataccagtgtgttggcgtttcacctaatcatttgattggactagaaagtcccaccaccggaaccgccaccgaaaccgcctgatgagccgcctgaaaagccgccagaaccaccactaacacttgttggattagcagcactgaccgcactgccaacactactattgagagctgttgtaaaggattgaccgatgttcaaccccccagtatacccgtagtaataataataacccagaggcattgtttgaagttgttccggcgtcaatcgaatcttcaaagctttaacgaccttatcagcaatcccgaaggccgttgcataactcaaatatcgatcccacaatagtacatctgggacattcgccatatcgagtgtcgaaatatcctttagcatttgtttaaagccttgccattcgccccgtttttcgtaacccaattgcgtccatagttgcaaattaaatctacgccagacggttaaaatgaagacaagccccatcggaatgagcgtccaccaagcaactaagccaatcaaagcaccaaaaatcaaaattaaaaatagggcgccaaggccgattaaccaataattcaaactggtcattaactcagcgatgtgttctcgtaaccacccgctacgacttgcttcagtcgccactgctgtttgccacccatggtaatgttgattgaacagttttgcactatgccgttttggatatttctcaatctcaaatagactgacatgctgcccatcaccaatcacatcaaatagccagctaactaacttcttttctgaatgtgataactgattgcgattgacgagcgttaatgaaaattgcggcgtttttttatggaatagtcccttctttggttcctgaacatcaattgttagattctttcgagcaactaagtctagaatcgttgcggataagctctccgcccctgctgtctccgtaattggtaatgccaacaactgacgcacaaccgcaggcccattttcatctggtaaatcatagacgtgttctggtgcctgtccagtataagtcatcacaggaagcgtttttcgaattttacgtaaaattaacaagaacatgccgggcgctaagaccactgctcctatagataaaagccaataacggcgtttttgtgctttgcgttcttgattagcttgttgcgccaaacgcgcttcttgtttgataatggcttcccgacgtgattgatcaatctgattcggattcgccgcagtcaccgccgttggaaaaataatatggctttcgacaaattggtttgctggattattagcgagtttaattgttacccggcctttatcgggttcaacgacttgttgcccatctaaattgccgtgcgtccatgatttgaggtctgcttttttgaatgtggtaggtaattgtattaccacttgaacgttttgtaagtcactatcccacgcatcgccaatcactttccaattcaattccgccgtatcacgataattaataatcagattttgtaactgatatttcaaagtaaccgctaattgattgccatcttgtgcagtttggtatagtttgaaccgataattttgttgtgcatcagttaagctataggtgccttcagtacctgattcactttgactaaacggatgaccattaactgcgacttgcgggttaaccaacttctttggttgaccaacgtttgtttggagattctggttgatatagaccccatggatatcatcttggatatcaaacaccgttttttgttcgacctgagcactcccatcaggttgtacatcaacgtttacctgataacgactgatgtcataggtatcggcagcctggactggctggctaaaaataaaggtccaaaacgccgctattaagataaaaataccaaacttagttcgttttaaattcatagtttgccttcgttctgctcaaccttcgttaataaatcagggtcgaattgccccgctttgagcatcgcaatttcatacgcatatggtgcaaagttatgcttcttatcttcgccaacatatggggtttctagaattttaggcacattaacgagttgttcatgctgtaagacatggtttagcgcatcaaatccgatttcaccaaaaccaatattggcatgacgatctttgtgtgcgccttgtgggttcttagaatcgtttaaatgaacaacttttaagcggtccaaaccgataatgtgatcgaattcattcaaaacgccgtcaaaatcttcacgcacattatatccggcatcatttgtatgacaagtatcaaacgtcactgataacttttcattgtaagtcacgccatcgatcatctgtgcaagttcttcaaatgaccgcccgacttcggttcctttacctgccatggtttctaaggcaatttgggcggtttgatcaggtcgtaaaatttcgtttaatcctttgataatttgttgaataccagcatctgcacccgccccaacgtgtgcacctggatgcaagacgatttgagtggcccctaatgcttcagcgcgtaacacttcttcttgtaaaaaagagaccgcaaacttgaagttctcaggcttcactgtattccctaaattaacgatgtatggtgcatgaacaacaattggacctaagttgtgagcttcaatatagggttttgctgcttcaatatttaattcttcgattggtttgcggcgcgtattttgtggcgcgccggtatatatcatgaaggcatttgcaccaaaatcaactgcactctccgctgaccctagtaacatctgcttgcccttcatactaacgtgactccctaataacattccactacctccatgcattttgattacctagattgtcacagaaagcgcaacaaaaagcaagacgaaacctaacccataaaaaaagcccgccattcaattgaatggcgggttatcttatttaatcttaggttcatagaaatgcccgagaattttgacagcttccgtcatgctgacgaatgcgtggtcatccgcttgtttcatgaccatttctaaatcatgcatttcaaagcgagaaataacggtaaataacatcgtcttttcttcacggttatatgccccttctacgtcgtggacaatcgtaatcccacgccgcatttcgtcttgaatcatttgaatcacaactttggacttatcggtaataatcatcacttgcagtttttgttggcgcgtataaaccatatcgatgactttgccgttgacaaaaatactcaagatactatagagcgcatgttcccaaccaaagaggaacccagcggcaaaaacgagcgccacattaaacatgatattgattgaaccgactgaacggccggtttttttgcgcagtacaatcccaatgatatctaagccaccagtggaaatatcgtttttcaaggccatcccggtcccaaaaccgttaattaccgccccaaaaatcgcacagataatcggattagccgttagctgtgtaaagggcataatctgtaccataacacttgaaaaaacaactgcaataaacgtataaatggtgaaatggtggccaattttgaaccacgcaagaataaataatggcacatttaacacgaataacatcaatgacgttgataatggaaatggtagaaacggcataaatttcgacgtcactgtatgaatgaattgcgcgaacccggtaatcccagaggcgtaaatgccaccttcttcccagaaaaagttcaatgcaatcgacacacaaattccgtataaaatggctgccgaaatcttcgccatattttgatgtttccgagctaaatcgtccacttgaatatcacacctatccacttttgatgtctttcattctagcataccatttgtgaatactaaaggatttcttggaattaatgcgcccaattttcacgaatgaaagcacggcgtgtcccctcgaccaattctgctctaaatggttcttttttatagaaatcttggtgatattcttcggctggatagaacggtttggcagcctcaatttgcgtgacaatcggttcgttgaagcgaccactatcgattaatgcttgtttggaagcttccgcgattgcacgttgctcaggcgagttaacgaaaatcaccggccggtaactatcgccacgatcttggaactgccccatggcatcggttggatctgtttggcgccaataaatttcaactaattccgcataagaaataatcgcgggatcaaatgtaatttcaactgcttcagtgtgccccgtcgtatgcgagcaaacttcctcataagttggattaggaacatgcccaccggtataaccagaaacaaccttgataatccccggttgctgatcaaacggatgaaccatgcaccaaaaacacccaccggcaaaaattgctgtatcagttgccattattgtgccccctcttcaaataagcttagatattgaccgtaaccttcattttcgagttgttcgactggaataaattttaaagctgctgagttgatgcaatagcgtaatccaccagcttcttgcggtccatcattaaaaacgtgccctaaatgcgaattagcttcttcactacggacttcaacgcgttccatcccataagattggtcccggcgttccgtcaaaggcgcaattggctttgtaaatgagggccaaccacagcctgcatcatatttatctaacgaactaaataatggttcatgactgacaacatccacgtagatgccttgttcatcaaaatcatcatactcgccggtaaatggggcctccgtcgcattttgttgggttaccgcatattgttccgtcgttaaccgttgttctaaatcatctgtcatatccatcactccttcgtgtttattattataagcagatacaaacagatagcgacaaatatgctcagagtgttctgacagtctgggatttcctgaggattaaagtgaattgactgccatcaaataaaaaagatgcctcaaatttacttttgaggcatcttatatgcgttaattttgatttaactgttgttgcactgctttaaagtcagcatagacttcagcaagtggtaccgtaatttcaacaccactaatcatgtctttaacatgtgctgtttgatcagctaattctgattcaccgattgtaatcaccatttgggcgtttaacttattagctgttttaaattgcgcttttggtttacgatcaagatagtctcgatcagcggttaaacctgtatcacgaatcttttcaacgatttggagagttgtcgcacttgtttcagcgccaattccaacgacatacacatcgagtttagattctggaaccaacgcttcgttttgcgcattcatcaataataataatcgttcaacgcctaagccaaaaccaacccctggcatgtccgggccaccaagttgttcaactaacccattataacggccaccggctaagacggttgtgtagccgcgaccaagcaccttattatttgtcataatttcaaaaattgtgtgattgtaataatcgagtccgcgcaccatttcagtatccacttcatatggaatgtgcaatgtttcaagtaagtgcttaaccgtttcaaagtgcgccgttgcttctggtgttaagtaatccaaaataacaggtgcatccttcacaatttcttggtccttagcatctttactatctaagacgcgcaatgggttcttgtgtagacgaactttagaatcgtcacttaattcatcaaaatgtggttcaagatagctgacaagggcttcatgataagccgcgcgactttccgcatcccctaaggtattgatggccagttttaaatccgtaatatggcattcacgtaataaacgcatcgccatgctaatgacttcaatatcgaccgctggattctcagaaccaaatgcttcgaccccaatttgatggaactggcgttgccggcctgattgtggccgttcataacggaacattggtcccatgtaatacaccttataaggtttttgatgttctggcccataaagtttattttctacgaacgcccgtacaactccagctgtgccctctggacgcagcgcgacatgccgatcccctttatccatgaaatcatacatttctttgctgacaatatcagatgtatcgcctgaactccgtgaaaagacatcatagctttcaaataatggtgttctaatttcgttgaattgatagcgggcaaaaacgtcgcgtgccgttttctccactaattgccactggtttgaatctccaggtaaaatatccgcagttccttttggcttttgatagcccatgatcattcctccaaatggataccaaataaaaaaacacccctgtcgttgaacaagggtgcttaaatgcacggtaccaccttaattttagcttaattatataacgttgttgccaacggtgtgcgaccacacagacctcaaaagcagtctcggcgtgccattgatttcttgcagctgtgaaatcatctctgtcgtagggggcttagcctttactttatcactggtcatcacttattcttattgttataagattaacgttatttcaaaaaaaagtcaatcaatcttgaattttttgtaactttttcgctgaaactctttagaaagttgagttttttgctataattaaccttataaattaataaaacataacaaaggtgttgaaaaaaatgcagaaacctttgagctggtttaaacactatccggccgttattatattagcattactcgtttttgtcggtctctttgtgacccacgcgctggctgcttaccaacaaattacgattaaagcgaacgtcgtaaacgttcgccaaggccctggattatcttatgatgtcatgagtcaagccaataaaggcgaaacaatgaatgttatctcacaaaagaataattggtaccaagtgcgcttaagtggtgataagattggctgggttgctagctggttagtcgataacaccgaagtcagtgccacttcaaaccgagtcgctaaggtcaccaacagttttgccaatgtccgccaaagcagtagtgccgatagtcaactactcggtaagttaaatcaaggtgacgaaattacagtcttataccaacaaaacggttggagccagattaaatacaactcagcagttggttgggtacaaagtgatttaatcgaagtttccgaccaagctccggcgactgttcaaaaaacgacaaccgctgaatctgagtctacggatactgatacaagtagctccgcgattaaatcagtgaccacccaactggataataccaagctacgcactggtcctgatgtttcgtatcaatatacccaaagctacccggccaataccaagctaacttatatcaataagagtggtacttggtatcaagttaaagatgccgatggtaataccggttacgtcgcaagttgggttgtcactccttctgagaagaatgaagttgttaagactagcgctacttccctttctgaagccaccattgttttagatgctggtcatggtggcaccgacgtcggtgcactttcaactaagtctaagtatgaaaaagactacacattagcgaccgtcgatgcgattgctaaaaaattaaaagcggctggtgctaacgtggtgctaacgcgttcaaatgatagttttgtcgatctcgaaccgcgacctgctcttgccaataaattaaaggctgatgcctttatcagcgttcattttgattcaagcaatgaagccaatgaagcatccgggacaacaacctactactattcaagcagtaaggatatgagcctcgcgaaggccatcaacaatcagactaagacattaccgcttaacaatcgcggtattgaatacggcaattatcaagtccttcgcgataatcaacggcctgctgttctcttagaactcggctacatcaattctgataaagactttagttatattagcagtgctaattaccaagctaaagtcgctgatgccgcttataccggcttaaccgactatttcaaataactaaaaaagaaccgtcaaaaacaaattcactatgaccttcaactctcccactacgcaggtcacacgacccaattggccttccaatttgcaaagtttaagtacacggatcaaattttattaattattggtggagacggcacgctcaatcaagccatcaatggtctccagaatgctcagcgtggcgatattccgattgcttacattccttgtggatcgggtaatgacttcgcccgtggtgtcgggattagtcgtgatccattgaccgcactcgaacaaatcttgtcggccacaatgccaactgccatcgatttaggttattatcatgacacaacgaagaacgaccatggctacttcgttaacaatgtggggattggttttgatgccaacgtggtcagcaccaccaatcattcaaatcataaacgacttttaaatcgattgcacttaggctcattagcttacatcagctcattggttaaagtttttatgcaccaagatgcgtttgaagtcaccgtcacggctgatcaccaaaatcattattttaaacgtggctttttagtgaccaccactaaccatccctactttggcggaggggtccccatcatgcctagcgcaacggtcgacaaccatcaacttgatttaattgtgattgaaaaattgaatccctttttcttttgctatctttttgtgatgatgttgtttggtcggcacacacgctatcaagcggtgcatcactttgaaggaaccaacttagcgattcaaacaaaaacattagaattcgggcaaatggacggtgaagaacttggtagccggacatttgatattcactacagtcttaaaagccaggcattttggctaaagaagcaagcataaataaaaggcgctgcctccaagttgggggcagcgccttttaacgcgctcttcaaatcatgttcctgtgcctagcaacacaagtcaaccgattgctttcagcaatcattcgcattgttaggctagtgctcaaaagttgaccaaacttgattgcactcatttctttagaagtaatccgagaagtatggttggtccattggaataatattctcgagattttttagtgcttgtcggttggcttggagtctttcaatctttgccaagtatgatgggcgtcgatagctcatcagcattgttgttagtgtctggatgtcgcattgaattcgttcaccgactgggcgacttgtgacctgcacttttccttgttcatcccaataaacgccaaacgtaccgttattccattcagctaatggatcggtcaattcaatgtggaatgcttgcccgtccgtttcaaacggataagccaacaagaattcacgcacatcaacaatccgcgccataaaatatggcttaatcgtctggtcaatatcaccatcttctaataagaatgaaatcggttcatcctgatattgattacccttgacatgttcaatcattgaataatgcgcgccaatgaagttccacagaccaatccgggcttcttgattaagataaatcatttctttaatatggaagacttcgttggcaatccagtataaaacatagccggtgggttgttcattttcatcataataaacaccagcaatccgttcttcttcattttcccaacgccaatattcatcccagttcagttcgttacgaatcattgcaccgtgattttttagtgcaaaccgttgatacgttttaatcacgtcttcatcgtcaatatcaaggcgttcaacgtgcccatttaccggccgttgcttaggtaattggctatcacgaatatcataagttaggtgatcagacatgatctcccaccctttcttacgataaaacggaatgctgtatggatataaatacgatatccactgcttattctcacgcatcttgttcaagccgactttaaccaagtcatgcatcaaaccatgaccggcatattccgggtaagtcccgacaccagtcaaaccacccatgttaaatacctggccatgaatgttcacgcggcaatgatagatggctaattgtgaaatcagttcgtccccattaaaccatccgattacgtcagatttttctaatacgggacgtttggcgcgttctaattcgccctcttcgtagccactatcagaaacttcctgatcggtgacttgaaaaacataccgtaataagtcattaaattgttctaaatgttcaattgtcacgggtctaatctctaaattagatcgctggtcaaccattgtttcgcctcatttttcgttagttgtttaccctattatacactattttgatttcggcataaaatcgtacggtgtcaccccggtcatcccaatcattggatccacttgctgttgcgttagaacagtcggtgttaagacataactgattggcgtttcttgtattgcgtcgtcgtcttctggcactaagttcagttgttcatcaacagccgtttctggcgcacttggtggtgccggctggtcaacaattgttttggcttctgtctgccccacactggccgtcttaatggcggtgctgagttgttcaccgttaaagacactttgaatccgttcttttaacgtcgtttgccgattggccgaaagttcctgagctgctttttggaaagcactcggttcaccaatcagaatcaacaatgatttagcccgcgtgactgctgtgtacagtaagtttcgcttgagcattcgttggtattgattgaccaatggtagaatcaccatttcaaattcagaaccttgcgccttatgaatcgacgtacagtaagccaatgtaatcttgtgccactcactccgcttataggtcacttctgcactatcaaaagcaatggtgatctcgtcaaccttgtccgcactctttttagcataggtaatccccgtaatctgcccgatttcaccattaaacacattttgttccggactattgaccagatggagtactttatcgccaatgcggtagtgaacgttaccaatgctaacttgttttttgcggtcatctagctttggattcatgatattttgaatcatcgggtttaactgatcaattccggctgctcctttgtacatcggcgctagcacttgaatgtccttagtttcaaaaccacgcgctttggccttagtaacgacttgttcaatcaccgattcaatttgatacggattacattgaatgaaactgcggtctttttgcggcttcaacaaatccgctggcagttggccttgattaatttcatgcgccaacggaataatcgttgactggtcatcttgccgataaatacgttgtaattcaaccgctggaataaccttactctgcaataaatcaaagaaaacttgccctgccccgacggatggtaattgatccttatccccaaccaatacaacctgcatatgactgggcaccgcccgtagtaatgagcgaaacaagtaagtatcgaccatcgacatttcatcaataatcaataggccgccttccaattctttgttaccggaaacatctggattattttcgcggccagtgattccgagtaagcgatgaattgtactagcaggcaaacccgttgtttcactcattcgttttgcggcccgacctgttggagcggccaataaaatcggaaacggcgtgtctttgtactcattaatatctaatgacagcccgtttaattcagcgtataacgtcacgattccgttaataatcgtcgttttcccagtaccaggtcctccggttaataagaacgcccggtgagtcatcgcaagcttaatcgcctcttgttgtacgtcatcgtatgtcaccttaaaccgtttttcgaggtggcgaatttcttgatctagatcatgtttaggatagctaagttgatcgcgttcattttcaattcgcattaaatggttcgcaatttgccactccgcattaaataacccattcggataaatccgattctcatcaccaacgactttcccatcatgtgcaagtgccatcagttgttcagccaccaagttcggatcaatggcaacattgcgtgctttttccatcaactcaatactagctgccaataacggcttggcctgggtataggtatccccagcttgattggtcaactcatttaacgcttgcattaaagccccttgcacccgcacggctgaatcagcggcaaacccgagggtctccgctaaattatctgcacgtttaaagccaatcccagcaatgtcagccacgagttggtacggattttcttggataatcttcagcgtatcttcatggtaggtctgatagatgttataggccatcgagctcccaaaaccatagttgtttaagccaataataatctgttccatcccattattaatcgtcagcgtttcaacgagttgtgcttgtttcttcgcatttagccccaatggttctaacgccgtcggatcctctaatattttatcaatcgcgtcaattccaagagtatccacgattttttcggccgttttctgcccaatgcctgtgaatttttcgccagacaaataagcgactaagccggccttagtcgttggttggtccacttggtaattatcggcttgaaactgtttgccatatttaggatgagtgaccactttgccatagaaggtatatcgttcatcttctttaatgtcgccaaaactcccggtcaccacaatttctgtttcgtgccagtcaattgtcttatgtgctactttaacgagtagaattttaaaaaaattatccggactctcatagaaaatactctggacggttccggtgactgttggtttggtttcgtctgtctttgttatatccacaatcgccatcccttattctttttgctttttagcctgcatgaagccttcaatatcaattaactgttgtttgttctttttaaaataatccggtgcatagtgcttggcttgttcgaaataaggctcactatcagcgcctaagaccagttgcgtcaagccatacttaaataatacttcaccattttgaggtgcaatggtcaatgcctttttaaggtaggtctgcgcttggtcaaaatcacccaagctcgttaaaatatcgcccactaaaagattggcgtctagttggtctggttcttgttcttgaacggtcaacgcgaacgccaatgcccgtggattctgttcgagttgatgatatgtctgcgcaagcatatactgcgcatctgttgattgtgagtcttgcaccaactgcatgaacaagggcaccgcttgttgataagcttccgcttgataatagagtgttcctaatgcgtaagtcaatgcagcttcattaggaaattgcgtcaacgctttttgcaaaagtgcttcagcttgttcaaaatctttaagcgtcgttaaaaatgtcgcaagggtaacgtaagcttcaatgtcttctgagtgatcttgtaaatattgtacgagatctttaacagcggcttcgtggtcgccagcggcccattttgctagaattgcttgcacgtgatcatctcctatatcgtatctgttgcggataattgcttgctgaggaagtgtgtatcattccacttaattagtttgaaagatgctccttgatcgtcagttgtcatcgtggtcacagatgaatttgtcacaccgccgtctttgcggacctgagccaatggcgtcttgagtaaggactgcatcatcgccaccatcgctgccccatggctgacaataataatatgatcagtcggtttagcggccttcacaattgcgtcaattgcctgcgtcgtccgttcaatcacttgttcaaaggtttcccctttaatctcagttggatcatactccgctggtgcttcacgaaaggctttcacgattgtcggatattgtttttcgacttccgtaaagcgcattccttccattagaccgagattaaattcgtggagtgcatcaacaaccgtaatcggaaaatcctgccctaagtctcgttttagcgcagcagacgttacctgtgtgcgttttaacggactcgtatataaatgatcaaaatgaatgggctttaaaaatgtggctaattcttcaatttcaacgtaactactgtctaataatggtgaatcaccgcgtgcaccttgatagcggcctcccaaattccattcagtcttaccgtggcggataaaatataaggttgtcatgcgttctctccttaaaataacttacttttcattatgaaagagttacgccctaaattcaagtcaatcgactaataaagcaagcatttttctgtaaaacgccatcaaaaaaaccgctaggataaaaatactttttatcctagcggtttcatctattagttgctctaaacgtgtttcagtaggcatatttctgcggttaaccctatttgccaaatccagttaatcctcaaaatatgaacgcttacttacacactcttttatttactttctgcgacagcttgcattgcaattgcgttgacgtagttgactggttgatcgtagtttggttggaagaacatgtcaaccattgctaattgatcaatcgtcatcttcgtttgaatggccattgaaatgacgttcgctgcttgagcaatatcatacatacttgtgaatgaaccacccaatacttgacgcgtcttaggatcccacattaagttcatcaaaaccggtgtcgttgatggcatgaaatcagggcggtaatcttgttctaacgttgttgtagcgacttcaatcccacgcactttcgcgccttcaactgttaggccactccctgaataggtgcgaccaaataattcaacggcagaagttgcttgcgtgcccatgtacttttcagttggtgtttcgatgttgcggccgattaaaaggccttggcgaacagcgttggttgccaatggaatgtaatctgctttttgtgttggattgtaatgaacagctgctgaatcgccggctgcataaacatccttaacagacgtttgcatgtattcatccgtcaaaatcgcaccgttacctaacatatcaacttgccctttgaaaaggccagtatttgggcggaagccaacacataaaattgcaatgtcggctgtgtattcgttcttatcagttttaacagtgacttgatccgtccctgagaaactgaccactttttcgctaagcgcgagggttacaccgtggtcacggtaatcttgttccacgatttctgagatattaggatcgaaattcttgccgagtgcgtgtggtaatgcatcgattaatgtcacttgcttatcagttgttgcataggcttctgccaattcggcaccgatgtaacctgaaccaatcacgataacactcttcacatctggggcgctcttcttcaattcattggcatgcgcccagtttttgcagagcttaacgttcggattgtcaatgccttcaattggtggaatcacaggtgatgagcctgttgtgacgatgattttatcaaatttttcggttgtttcttcttccgttactaggttcttaacgcgtaatattttttgatctaagtcagcttctaaaacagtgtgttgcatcttcatgtgagcgcccgcttgcgctaacatttctggatttgaatagaacattttctgaggatcggctacatggccgcccacccaaagggcaatcccgcatgataagaatgataaattatcgtgtgtttcataaaccgttatatcccaatcaggatgttctgccaatgttgcttgtgttgcaaatgtccctgcgtgtgtacaaccaataactgctactttcatcatgttacctcctagaaatatccaaaaaacgacggttaatcgttgagaatttgtgaaatattacgcaaccagcatgtaactatattgtacgctacttagtttcgaaaagtcaattgcctccagctattaaattaatttcacaatctaaaacgaataaccacttatgttttaaacgttatattgtgattttattctaaaaaaggtcgttgaccacttattgaacaaacccacaaaaaaagtgctgataaatataaattcatcagcacttttaacgattaaattagatatattgtaatactttcatgtcagcatcatcgttcgcagccttataagccacgtcaatcgtgccgccacctaaacattctgcgccgtcataaaagacaaccgcttgaccaggagtaatcgcacgcactggatcatcaaagacaaccgttgcagttgtgtcagatgtcatgtggacggttacgccgacgtcttgttgacggtaacggaacttagccgtcacgtggaaatctgtcccatgatcaactggtgtgatccaagaaatattacttgcatctaattgatcagcatagagtaattcattatggtagccttgaccaacatataaaatgtttttgtctaaatctttaccaacaacgaaccatggatcattggattcgccaccgccaccgattccaagaccggagcgttgaccaatcgtgtagtacattagaccgtcatgggtgcctttttcaagaccgtcgaccgtcatcatcttaccgggttgtgctggtaagtattcgcctaagaattgcttgaagttccgttcaccgatgaaacaaatcccggttgagtccttcttcttagcagttgctaagccagcctcttcagctaaccgacgcacttctgctttttgcatgtgaccgattgggaacattgatttttgtaattgatcttgagaaagagcgctcaagaaataagtttgatctttattgctatcaccgccacgcaacatgtgcgcgatgccgttatcatcgcgttcaatctgagcatagtggcccattgcgatgaagtcagcgtctaattccattgcgtaatctaagaaagccttgaatttcacttctttgttacacatgacgtctggattaggcgttctgccgtgtttgtattcgtctaagaaatattcgaacacgcggtcccaatattctttttcgaagttgacggaataataaggaatgccaattttagaagcaaccttggcaacatcctcataatcttccgttgcggtacagacaccattttcatctgtatcgtcccaatttttcatgaaaacaccaatcacatcgtatccttgttgctttaacaacaatgctgtgacagatgaatccaccccgccgctcataccaacgacgactcgtgtattactgtggtcaaccacaatatcaccatcatttcaaatagattctagttttctacgatttgaaggtcgtgaattccagtacttaacattatagcaatcttggttaatatttcaaactaaaacactcacttttcataagttaaacgtaaaaaaagcagtttacctatcaaactcctggtaaaccgctcttaaaacgttatttagccttctttaattaacacttcacgtgccactaagttagcaataataaaattaaattgttcgacgttttcagcattcttttcactcttgaaaatatcgactggatgtaagccatctggagaggtgacagacatcttcaacgtctgtaactctttaccaattgtcatcttcaacttaatcgcactgttaaatggtgaattaggatctaatggccgttccatctggaagttaccattgtttgtgggcacaaagccaacatctcttaatgtgtattttttaacggcgggattgagtcgatattgcaccgtactccccaaaaccgttgctgttgtttttaataaagccatctgcctaacctccatacactgaataagtctattttagcacaagcacgtaaacgctgcctaccccttagcggcttgctttgctaaattgcgtttcacaatcttcgtgagcgcttcggcaaaagcagcgacgtcttcgctcgatgtttcgtgaccaaaactaatccggatgctttcggcaacgcgcgggctatcctcaccatacatcgcgatcaacacgtgtgagggttccaaatcgccagcagtacatgccgaaccacctgaaattgcaaagcctgctaaatcaagattcatctgcaagacataggttgaaacacctttaatccagaggttcacaacatgcccgacttgatcagctccttctgcgttcagcgcaaaatcaatgtcgttggcttttaaatcagctagtaattgctgtttgaatccagcataccgtgcttgtaggtctgctttaaccgctggggccaataattcaactgctttcgcaaaaccagctacagcgggcacattttcagtccctgcgcggcgcttcttttcttgttcaccacctaggacaaatgatggtaaatgaatcgcgtcgttgacatagagaaagccgatttgcttaggtccattgatcttgtgggctgaaactgccagtaaatcgatattgtcagcttgcacatcgatatctaataagccatacgtttgcgtagcatctgtgtggaaccaggcgtttgagtcgcggacaagttcaccaatttcgtgaattggcatatgactgccgacttcgttattgcccatcataatcgatactagaatcgtttcgggcgttaaagccgccttcaaatctgcgagatcaatcaccccttgttcgttgacgggtaagtaaatcatatcaaacccttgcgtttctaaataggccatcggttttaaaacggaatgatgttcaattgccgttgtaataatccgcttgccttctttagcacgcagtttggctgtctgaaggattgccgtgttattactttcggttgccccactcgttaagataagctcgttatctttcgcatgaatgctctgtgccaaagtatggcggctggtatccaacaccgtgtgggcttggcgcccaaaataatgggtgctcgatgcattcccgaaatcggcctgcatctgttcggtcatcgtcgcaatgacctctggggccatgggtgtcgttgccgcgttatctaaataaatatgtttcacaatttttcgcctcattttaaaaagtatctataatagtttaacataattcgcttttaaagcacggataaacacttttcgctaccaaaaaaggctgggacaaagataccttgtcccagcctttaaaacacttaatctcagattaagcagtcattaaagctgctttttgatctgctgttaatgattcattcatccggccactcttgaaaccagctaaatcaaccgttacaaattcaaaaccagcttgttgtaatgcttggttgatttgttcgctgtgggttaagaagtcagcaatttgtgcttctgggacttcaacccgggcgattgattcgtggtaacgaacacgaaccgttgcaaaacctaaatcacgcaagaatttttcagattgcatcacttgagcaattttggcttcagttaaggctgtgttatatggaaagcgtgaagaaactgaacagctcgctactttattccaattatttaagtttaatgcctttgctaattgacggacatcaatcttataaaaaccagctgtttgaaggacactttctgcgccagcttcgtcacgggcccgtaaacctggacggaagtcgctgttatcatccatgatcatcccatctaaaacgtggtcaaagcctttttcagcagcaatttggttcaattgtgtatagaacatcttcttgctgtaataccatgtttctggtgtgttgttggcaatgtgttcgtcagataagtagttcaatgttgttgtttcgacattcgcgcccatatcatgtgccaagtcgatggctttgttaaattcttcgtctgtgaataattctgagttagcaacgactgctaagacgttttctttgccgagtgtttctaaagccatttttaaaactaatgtgctatcaatcccaccagaaaaggcaacaatcactttttccatttgttgtaaactggcagttaacattgcttttttttcagataatgtattcattgttaaagacttctttctatatcattagattaattgttttaaagctgttaattcattttgaatccgatcggcatacaccaaatcgttgttatctaaactcttgacgatcatcaagtttaaatgcgcggcactatcaacaaagtttttgaaagttgattgactagcggtttgttgcgcgtcatcaaggctaccataaagttgttctgctgttaaaagcgcttgttgcgcttcaattaaactggttgagattgtccccggttgtgaggcatgagcagcgacttcgaataagtcgaccatcatgttttgcgtttgtttaatttgttcacgcatggttgattcctccgattaaattagatgccaaagaaactccgcataaagagtgcggcacatagaccaccaacaaatggtgcaattccgggcacgataatcccgtattgccaatctgagttggctttatttttaattggtaaaagcgcgtgagcaattctaggacccatatcacgcgcaaggttcattgcgaatccggtaggaccgcccatccccatcccaattgcccaaacaagtaacccaactgcgattggtgcaatcccaggtgtcttgatttgtgtaatggcgataattgatgaaatgaaaacaaatgttgcgaaaaattcaacgaagaagttccgtggtaaattccggataccaggtgctgttgagaagatgttacgaaccgcaacaggatcgacattgccttctgatgctttaaattcatcagcgtacatgatatagacgataactgcaccgacaaccccgcccaagacttcagcaactgagtaagggataaacattgcccatgaaacgttgcctaagatacattgtgctaacaccatggctgggttaattgaaacatctccgaaaatgaataatgaaactgtaatcccaaacccccatgttgtaatggcaaataaatgacctgagccacgatactttgaacctttgaggacttcatcactgtgaaccccaaccccgaaaatgatcatgagcgctgtgcccatgaattctgctaataactgatgaatcatgaataaattcctccaaataataacgatttaatatctaaattttgatagctttaacgcgttacatcaggatagacccgactcgggcatactctgataaacagcaagataaacttgattaagtgccacgtcatgcgccttggcggcagctagacaatcgtcgaactctggactatatttttcgagatcgtcatagttcacgattttgacccgaatatcgccgaagcgcgtggctacagtgataaaatgacgtggcataatggtgcgccccatcgtctggtaacgcacaccaacagttgctgtgtgttttaagatcagataagtcatggcttgttgatcggctggatgaatcatgaccgttagcttaattgcgggccgatttttcttcatttgaattggactgaaaaaggcatcgagcgccccattgtccatcaataaatccaaaaccggcgctaaactttctgctgactggtcatcaatgttggcctccaacactaaaatctgatcggtatcggttttaacaacctgttggcttagttttttttttcgcacaacatcacgcgtaatgcattgagttgcggtgtttcccgattaccaaaaccatagccgactttaatgatcgtttgatcgtctgggattggacagaattggtcgacaatcgttttgacaatccccatcccagttggcgtgatcaattcggtctgcaagtctgggttttgtttaattggaatcgcactaccgacgcgcatttgcatcacagcggggactggtacgggcatcatgccatgcgcgactttgataaagccactcccatccgttaattcggatgaatagacttgattaactgccaataattcgagggcgacaaacgctccaacaatatcgacgattgaatcaagcgccccaacttcatgaaaatgaacatcacttaatggtaggtcatgaacgaccgcttctgattgcgcaatttctgtaaaaacttgtttggcgttcgttttaacataatcgcttaaatcactgtgatcgatgatggcttcaatgtcttttaaatgtcggacgtcatcaccatggctgtgcgtgtgtccatttgcgtgttgatgcgtgtgtgcatggccagttgcgtgtgtatgcggatgttgatgctgtgccggtgttgtttcaataaaaccttcatccttgtgcatggcttctggcaaatggacgtcaaaatcggtgccataaatactacttttagcaatccgttctgcatgtaggtggtagccagggacattcaacttagctaattctgtttcaaactgtttgaaatcaacccctaaatcgagcaaagcgccgatgaacatgtccccactaattcctgaaaatgcgtctaaataaagagttctcatttgtcatcctccgtgtcacttaaatgattgatcatacttgctgagtagcccgcaccaaagccgttatcgacattgacgacggtaatcccggacgcacaactattgagcatggtcatcagcgctgttagtccgccaaagttagtgccatagccaatactggttggcacggcaatcaaaggtttttcgatcaacccaccaaccacactggctaaggccccttccataccggcgaccacgatgacaacttgggcttggcgaatttcatccaaatgttcaaacaagcgatgaatgcccgccacaccaacatcatagattcgtttaacttgattaccgtatacttctgcagtgaccgccgcttcttcggccactgccatgtcggaagtccccgctgtgacaacggcgatatagtgatccgtggttggtagtgggtcaaccatcagcactacacattgcgccatttcatagtacattgctgtcggttccgcttcttgaatcgcagcgtacttttctggggaaactcgcgtacataaaatattttcggcatgtcgttttaacgaaccaatgatgccaatgatttggtccgccgttttaccggcgccataaatcacttccggatagccattgcgcttttgccgacttaaatcaaccttggcaaagcctaaatcatcaatggtctgcgcatgtgccagttgctttgttgcttctgtcacactgactttttggtttgcaacagcttctaaaagctgttgtagctcatttgttgtgtccaaactactcattctttctattgttatttcacaataacccctaaaccatcagggatcactgtcactttggcatctgccccttcaatctcgtaggcccgttctaacgctgcatctaaactggttgccaattccatatgcatgtctgtaattaattgtggatcaaccaaatctgacacgaaaatcacatgatgttggaccagaatccgagccaagatttgtgatgtccattgatcagggaccgtttcaagccgtggtgtattgattgcttggtctaagaattctttaggatccttaacgtcagcaatattgtgatagaacccatcaccaccatgcccgtcacgtgcaccagcgaccatgataatcacgccaccttgtttgttcgtcgcttcagcagcagtcatccctttaacggcttggtaaatattttgatcaagtggatagccaccatttgttgaaatggcgatatcacaatcgatcttgtcgacttctgataaactttcaacgaagtcacagccttttttgtgcgctgtttctaaattaccggcgaatgaaccgatgatgtgcttgtcttcatctaaaacaacgttcaagatgaattcaagcccagcttgtttagcggcataaaccatatctttgtggactgggttatgcattaaattcccggttcttgaatagtgggaattgatgaattcacctgagtggttggccataattgttttgtatgaagccacacccggtaaaacagacttccgcccgcctgagaaaccagcgaagaaatgggattcaatgaagccttcagaaatcaataagtcagcttcaacagcgactttattgataatgcaatcgccacctgatggcaattgaccgattttcacaactgagctgtcatcggttgaaacatgcatgacgatttcttcatttgcaacgatttcttcaccatatttgttaaccaattcttcgtgcgttgatggtcgatggaacccagtcgcaactaaaatccgaatccgtgcatctggtgctacagaacgaatccgtcttagtaaaatcggcgtgatgatatgtgaaggaactggtcgtgtatgatcagaactgataatcacgatattctttttccctttagccaactcttctaacttagggctatcaatgggattgtccaatgatttttcaaccgtttcggcttcgctcattggattttgatacgtagcagcttgtgaaacaagcttcccggcaaaattcgcgtctgcaatattagccgtgataattttttgatcgtaaggtaatttaatggctaccaaactataggacttcctttctcaatgctgattgaatgcttttttaaagctacgtccatagttatacagattttctgaaaaggatgcggtataatttatgaacaacatttcattattacttttaggtgtaacaaatgataacaaccttatagtcttcaagacgtataatttagattaaagttatttaatgattagcagatataataaatcagcacaaagggtaggcagatgcattatggttttaacagacattgaatttttaattaactttttagaggaacgtcacgtcccagtgattaccaaaaagaagcacacatacttgacgtaccacggtttggaagaacggtatacttatattctgaaaaaaggcgtgattaaaaactcgatcattttacaagacggtcgtgaattcaatctctcttacattacccagccggatgtcatttcacttttacgggatgaaatttcaaaatatacggatcaaccgtttaacgttcgcgttgaaacagaggaagcaactttctatcagattgaccgcgtgaccttctggaactacgtgaatgccacccccgagttacagaattacgttaaaaattactatcgtaaaaaattatccgagaatatttatcgcttgcaaaaaatggtaatgaatggtaaaaacggcgggctgtgtgccttcttatatagcttaattgatctctttggtaagaaacgccgcgatggcatcctgattgacttcgtcgttactaacgaagacattgccggcttctgcggaattagctcgcgcagtagtgtcaatcgcatgctcaaccaactcaaaaaagacggcgtgattgaaaccaccaagcataaattcttaatcaaagatgtcagttacttgcttgataatatcgccaattagcgatttgttaacatatgtaaacatgattcgtgattgaaaacggctatgagacgcgtagccttaacagtcgagaacaaatcagtggaggtttttatgtatgcatattccagataattatttaagtccccgaacgtgtgccgtgcttgcagcggccgctattccagtcattggcttggcactcaagaaagttaaataccaagtcaccgaaaaaaaagaaacggtacccatgttagggatttccgcttcactatcgtttttgatgatgatgtttaacgtgccaattcctggcggtacaaccgcccatgctgttggtgcaaccctattagcgattctcattgggccgtacgccgctagtctagcggtaacgattgcactcatcatgcaggcctttttatttggtgatggtgggattcttgcactcggggccaatattttcaacatggccattatcatgccatttgtcggctatggtctctatcgactattccaaaaagcacaccatcccaaagtgggagtcgtagttggcgcatatctcgggattaatgccgccgcattaatggccggtattgaacttggtctgcaaccgctcgttgcgcataacgcagctggccaacccatgtatgccccttatccgttacacattgcaattccagccatgttgttcgctcatttattagtcgctggttgggttgaagccggctttaccctcgccgtttatcaattcatttgccgggctgcacctaacgaactgttcgttgcaccacgtcaaacagttgatccacaaaccagccgtcgcttacatcacgcgctttacagtttcatcggcctattgactatcttatcgccgattggcctattagctagtggtactgcttggggcgaatggagcgcaagcgaactcgttgcacaactcaaacatgatcacctaggtcacagtctaccaagtggtatggcccatggcttaaactttaatgccctctttagtgactacacagttgctggcgttccactatcacttggctacatcttatcagcggtaacagccgtcattgttttttatcttatcggaaaactggtgatgaatcattattcaacccaatcctaaattaccaacttggcttcaaacaacggaagctacgcccaaaacggtcgcgcaattcgaccgttttttaattcaaaatttgcgctttagtgatcgtttgctgcggcgctttaatcaaacaaaacctcaacctttaatcgcccatcaaacgcctggtattcaactgattagtttattggtgacactcatcattctcgtgttaacccatagtctacttttaatttggttgattggtttattgacgttaattcgaatttgccgcttaccaagccagcatttatggccgctttttaaacgcgtcggtgatatcagtatcattgcgattttattaattctaccgaatttttggctcggccaagtcgccacaacgcttttatttatcgtacggactgaaatcatgttattaaatattgctttctttctcgagacgatcacttggcccgcttttattgttgctttacgtcaattaagactccccagtctgctcattttgacactcgaaattagtctgaaatacagccacttgctcgcccaatttttacaagaatccctctgggaaattcggctacgctcaactggtaaaagccaccaacgacaaaatttagtcggttcactgattggccgcctctacttaagttcccgcaactacattaccgctttatacgatgcgatgattctccggggctacaccggacaagtcacccgacggacgccgctaacagtgaatcgctacgactggcgcttaatcagctgggatctagggctattttgcctattctatttcattcggaggtaatcagatgctgaatttgcaacacattcactacgcctatacgcaaaccgacagccttaacgatatttctcttaccatcgatgcaggcgaggccgtcgcgtttatggggcctaatggttccggaaaatcgacgctgtttaaattaattaacggtttgattcagcccagcgcaggccaatattattttaaagaccaacttgtcgatgcccgcttcctcaaaaagcctgcacaggcgactgccctccaccgcgcaatcggctttgtgttccaaaatagtgacgttcaattatttaacgaaacggtgcgcgccgaactcgcttttggtccagaacagatgggcttagccccagatgaagtgcaaacccgcgttgacgattgcctcgcgttgttacaaatcgaacacttagctgatcgcgtcccttatcaactttccggtggcgaaaaaaaactcgtcgctttgggcagtgtgctaacgatgaatcctgaaataattgtgctcgatgaaccattcaacggcctatcagccgcctaccaaacgctgattatccacttgctccaacaactcaatcaagccggcaaagggattttaattgcaagccacaacctggctcaagtcaaacaagtcgctaaacgggtggtcgtctttaatgaagaccatcaagtgacccatgacttaccactcgcaaaacttgaacaagaaccggaactgcaacgaactttagcattactctaaagagagtgtgttgtagttactgttaatcgcaggcatataactgatagcacaaatatgcggatatcaaaagcggcggatggcacaaaaataatttttgtgtcatccgccgcttttgcattttatattaatcgccttcgatttgtaactatccctctgtcgcattgaccgtgattgactgtccaatcgggaagtagttcattgctgttataaccaccagtcaccgctaaaatcgctttgacattgtcatctatgaaagcagcgtgcaaatcggcaatccgcgcttcaattggactagaattgaattggtccattaccaagacatgctgcccaaacgtcacctgataaccaagtgcactcaatcgatcattcgccggttgattagccacatatccgccaacactttgcaaactattactaggcgcgatgacccgaatctcatcaccttctgacaatcgtgtaggaatcatcttaattcacgcctctccgttaccacttcaaaacgctcacataaacaggcaattgtcggcgtaaacacctgccctgcctctgcatattcagctttaaaaaaaggctcgtgaactgaacgccaataagcaagggttcgatcactctcgccctctaaaaaggcatgttcagcgtcgacttgattatacttaacaatccacattatcgttttcgtaattgcaaccggccggtctcgtccatctaaaataacattataatcccccacttgtgggacatgctcatcgggttcatacaactcaatcgcagaagtggtggccgttttttgaccgattattaccaatcgtgccaattcattggccatttgttctgtattcccaaatgaataaatctccgctggttgtaaattaggtggtaactgctgttgttctataaaatgttgccaatactggctcacttctggtgtcattgacatcccctcttccattcgtaacgttgttgttagtttagcagaatttaaccatttaaccaaaaaaagaaacttacccattaggataagtttcttttgatattttatgcccaccgacgcatctttttaagcatcatcggatagcttttaattaggaaccattgtttcatcttaccggttgtttggtcggcacgaatcccagcaatccctttttcaagcatctgttcaaaagtgattgttggttctgtccactgaccatcaacgtaacacagttggcaatactgatttgacttggtgccatcttgttcactaccttggttttgtgcagtcactggcatgccacaactttgacagaatttttccatgttggactcctttaacgtgcttttcaaaccatgttcctacgtttagcctaattagccaaacaatcggcttcgccgcttattcgtctaattttgctaatcctcagaacataaccagtttgaacacacttattttcttaacgtgctttcatcaacagtttcctgcgctttgctacacttatcaaatcatcgactatgtcgctaattcgttaagttatgcaaatgctcagaagctaaccgttgatgacgcacttcttttatttaacgtgcttttcaaaccatatgcctgtgcctagcgacacaagtcaaacgattgcttgcagcaatcattcgccttgttggactagtgctcggaatatacccggtttgaacgcacttcttctttaacgagcttgaacgcacccattttatttaatattcttcaagaagttaagcaacattgctgctgatttttggcctgcttctacgatgaattcgtcaaacgttacgccggcttcttcgtcgccgacgtcgctcattgcgcgaatgacaacgaatggaatcttgaattgcgttgcaacttgtccaattgcagcgccttccatttcacaagagagcgcttcggggtaaatttctttgattgccttgattttatcttggctcgcaacaaattgatcaccggtgacaattaaaccaacacgtggttgtatgtcaaccgctttagccgccgcttcgatttgttgaacaatcttagcatcactttcaaatcgttggggttgttgtggtaattgacctggtaagtaaccaaaggcagttgcttctgcatcgtgataagcgacttcgcttgaaatcacgacgtcgccgatatgaaggccttcaccaatcccaccagctgaaccggtattaatcacaacatctggtttttcttcggctaataaaatcgccgtcgtcatcccagcttgcactttaccaattcctgattcaaccaacgtcacttcatgaccgtacaattgacctttataaaaggtattgccagcaaccgtgtgttgttgcacatcttctaattttgttaaaagcgtccgaatttcttcttccatggcgcaaatgacactaattttcatactaactctctccattctaaaaaaacattaactttaccattctataggaaaaaaagaatcaagtaaacgataataattaagccaaaggtaatcccaatcgcccaattcaaccgtttcttcattcgtttaaccgctggtggatcgactttcttagtccgacgcgttgctgtttctggttcgtcttcagtcaccgctttaagggcttctttttgttgttcacgtgcatattcacgttctgtcctgaggcgctcttgatcgcgctgtttaaaggcggcttcttcagcctctttttgttgtcgatattcttcgcgcgtcttaggttcattcgtcatttctaccgctcctattttgcttgtaattgccagtaatacaacgccataatcgttttggcatcacagattaaaccatctgcaacggctgcttgtgcttcttctaacgtcaacttttcgacgttcaagaactcatcgtcatctagcgagcgcttatgcgtgaccggcgttagtgtatcagtgtagtataaagtcattaattcatttgaaaaaccgggtgatgaaaagaaatccgtcacgtgcacgagcttttgcgtcgtcaaacccgtttcttcattcaattcacgtagtgcgacctgatctaagttcttttcacctggatcaatctttccagcaggaatttctaacgtttcacgttgcatgggggcgcgccattgtcgcactaaaaggatgcggttatccgccgtaatcggaataatgccaaccgccccatgatgatagacaatctcgcgacttgcggtttgtccatttggcagtgccacttgttgaacggcaagatcaatgatctggcctttgaataatgtttcttccgagaggaccttttctgtataatccatctgctaatgccacctttaccgtttaatcgctattatacgcgcatttaaaatcgtccgccatcgtcaatgctaaattcaggttcacggccgaattaaaaatccatccttaggcggatactcttttaccttaattcctgttagaatgaaggcatcaattaaatcaggagctgacaattatgtttaaaaaaataacgatttggtgcacaggcatgctcattacacttgtctcaatcccaattttggcaacatgctttgatatttatggtgattgggataatttcatctggttcagccttggtttattattagggctgatctacgttacaatcagcctcaaacggcttaaacgacaaccagaatataaaaaagatcagcatatttcaccacaaatgctgaaacactaccaagatgctggcatgagtgatgacgaaattgactttttcagacaaacgatgcaacaagccgaagcgcaaattaaggtacttgcaaccaacatgcaagctcttcctaaattacgggcaatcgatttaaatcacgatacaaccaaggtcagccaatcgctttttcgtgcgattgtgaaagatccaaagcggcttcacaatgctggcgactttttataccggcacttaccatcaatcaatgaactgactagcaaatacatcgaaattaaccatcatgaagtcaagacagccgatacctatctcgttttagataaatcggctgcggcaattgatgcgcttagtcaacagattcaacaagactacgcggatttcgtggccgaagacgtcgatgacttagacacagaagtctccgtcgctcaacaacaaatcaccccagatcacaaggaggaagactaatgtctgaaacgcccaatccaacaaacgatttaatgaatgatttattaaaagatcctttcgaccaaagtgcgccagttgtcactgaggaagcagccccccaggcagaggcctcaattatcaataagctctcccctgaacaacaagcacaggccgaacaattggcacaacaactggacgtcaacgaccaacaagccgtcttgaattacggcgctcaagcccaaaagaaactcggcgctttctcccaaacaatgctcaaccaagtccaaagccaagaaacaggcgaaattggtgacgcattaacgtcattgatgtaccgtttaaacgaagccaatcctgacgaattacgcgccgaagacagcaacgttttcaagcggatgtttggcaagattaagaagtcggtctatgaaatcactgcgaaatatcaaaaaattggcgcccaaattgatgggattgccgttaaattggacaaagaaaaaaatgcattaatgcgcgacaatgagacgcttgaaacgttgtatgcgaagaataaagcctacttcgatgcactcaatatttatattgctgctggtcagttgaagattcaagaattagaaacaacgacgattccagaagccatggaacgcgccaaaaatgacgataatcaaatggtcgtgcaagaagttaatgatctcaatcaattcaagaaccgcttggaaaaacgaacttatgatttagaattagcacggcaaatcacgttgcaacaagcaccacagattcgcttgattcaaaataccaaccaagcattagctgaaaagattcaggcttccattaacacggcgattccactctggaaaaaccaagttgccatcgccctcaccctgctccgtcaaaaagatgcggtcactgcacaacgacaagtgtctgaaacgaccaatgacctcttgaagaaaaatagtgcgatgttgaagatgtcttcaatcgaaaccgccaaagaaaatgaacgcggcgtcgttgatatcgaaaccttacagaaaacacaaaatgatcttgttgaaaccttacaagaaaccctcaagattcaacaagaaggccgcgaaaaacgccaagtggctgaaaaagaactcaaccacatggaaaatgatctgcgcgaacacttattggcctatacccaaggtcaaaccgctgctaacagcggaccaaaagaagttaattaaatcacaaaaatagcgccgcccatctttttgatgagcggcgctatttttgaatagttaagctattttgcgatgtttcaacatccgccaaccggttagagccgttgcgattaaacaaatcactagcgcaaccataaaggcatcatgcatcccagcgatgaacacattcgcgtgacctggaatataccccgtcactttttgcccgtaattgcgactcattgcggcatataaaaccgtcgttgacaatgaaatcccaaagaccatcccaagattccgcgcgagggcgttaatcccgccagcaatccctagatcttcaacaccgacggaactcatgacaatcgtgttattcggtgcttggaaaatcccattcccaagcccaactaagccaacgaagaacatgaataaccagatcggtgtttgtagattcatcaacatataaccgacctgactgatcgaaatcaacactaacccgataaaggttaacatttctggcccaattcgatccgagatactcccggcaatcggtgcgaccaccacttgaacaattgggaaaatcattaaactgtaaccggcaagattaggcgctaagcctagcgcattttccagatagaatggtgaaatcacattgaagaagaagttaacgatgaaaattaagaacgcacagagtaaactcaaactaaaatcgatatttttaaacaatctaaacgataataatggctgttctacatgttgttcaatccaaacagagatgccagcactaattaaggcaacgacaaaggccgctaaaataattggtgaggtaaatccaatttgttggccgatgaaaatgccgaggaataaactaacaattaaaactacaaaactggcaaacccagcatagtcaattttttcatgtgttttaacaatatccttcggtaaaataaaatgcccaaaaataatggttaaaattccaattggcacgttaatccagaaaatatagccccaactaaaatgcgctaagattagcccaccaatcccgggcccggcaatgctacctaacgcaacgaatgatccggttaaccccaacgctcgcccacgctctttcagtgggaaaacctcggtaataatcccattattattgctcatcgtcattgatgcccctaaagcctgaagaacgcgtgcacctaataacaatggtaagccgccattaaagccacacaacaaggaaccaatcacgaataagaaggttccaattttaaacactttgaccttcccaaaagcatcgccaattttaccgaataataataataaggcacaaatcataatcagataaatcgacacaatccattccgcttgattcatcggaatctttaaatcacggctcatgactggaagtgcaatattaacgatactgccatcaagcgtcgacatgaaggtaaatagtccgacagccgtcaatattcgccaacgatttttttgaacctgcggattatccacataacttaatgccatctgtgagtcactttctttcttttaagtttactccgtctattataccgtggttttagttaagttcgttgtctctgtatctgttggattggtattcgctgtataattcgtaccggttgtagtgccagtcgtagcagcagtaccagttgtgtttgctgtgtaattatttgtcgttgttgctgcggtgccactgcgacgactactgtagccactagttggatttaattcatcagcggtgctataggtaattgaaccatagccgttgttataacctaaatagtggttccagaaagtttcgtagttccgggcagaaccgccaatcccgaattcatagctagttgcttttggcgtccagttgttataaagcgaggtgacggttgaaccgttcaagttctgtgagctgccgttgattgaaaccgtgccaggtaattgaccagttaatttcaagactttgctgcttgtgaccgtacttggcttttcatgatcatcttccaaacgcatgaggcttgggttgatctgataaacgctgttggccaattttgaccagtatctttcattaatctggcttgagttgtcagttaagttacgaccagtactgtcataacccatccatgaagcgagggtgatcccaggggtactcccgataaaccagatatcgcggttatcatttgaagtcccggttttcccaactaagttgttggtattaaagtagagttgatcgtaaattgaagtagcagtcccatctgttaaaacgccggctaacatttggttcatgatgtacgacgttgcttttgaaaagacgcgtttcttcttagcgtgatgttggtaaacgacattaccggcgggatccgtaatcttttcaatcacgtaggcgtcggtatgttcaccttgatccgcgaaggttgaaaatgcactggcctgttctaagacgctgaccccatcactggtcccaccaagtgaaatccccagttgactgtattcatcagcggtgaggttgatgcccatcttactcatgtacttagaaggatctgttgtgttcttcaaagcgttataaaggttaacggttggaatattcaatgactgggctaacgcttcgtcagctggaatgaatttgttctggatcgtgccaccgtaatcggttggtgcgtaatccttgaagttggtcttgaaatcggccaacatcgttttagaaccaatcagtttctgatcgattgctggaccatagactaacaatggcttgatagttgaaccaggagaacgtttggtcaacatgtagtttgtttgtttgagtgagaaatcacgtccgccgacaaaagaaatcactttcccagtgcggttatctaacaagacgctcccgttttgaacaggggacgaaacggtcttttgtaaccccgtttcttcgtcagtaacggtatcggtataagtccgtccgaatgttgcgccctgttggtgaacaaccccttgcatggcatcgtaaatttcttgatcgatagtactgtgaatttgatagcctttagtgctgagtaattcagttgcttgtgtttcatattgtttgtagagatttggatctttgttaagtttggcagttgaaacattggcttctttggctaactgtttggccataatatcagttgcttgtgtttcaagtaagttataaacatagccataactcttcgttgtttcggctggatcggcttttggttggaattctttgattaagtcgactttcttagcggctttgtattcagcctttgtaatgcgatcgtcacgatacatccggaataacacggtatttttacgatctagaccatattttaagtattcaggatctttaagggtgccgtcttgatcatatggtgtatagacggaaggactctgtggcagaccagcaatgtaggcagcctcggctagagaaagatccttagcatttttgccgaataggcccaatgctgcttcttgaataccagcgatattttgtcctttattgttacggccaagagtggcaacgtttaagtagtcttgtaagatttcttttttagtgaaatacttatcgacccgcaaggcgagcaagacttcggttgctttccgtttaagggttacttgggaggttaaaacctgcatcttaatcaattgttgcgttaaagtcgagccaccggtttgtgaaccaaacccagtgacatcggaaataacggcccgcaagagtgctttggggacaaccccatcgtgtttatagaaatcctcatcttcggttgcaacaatcgcatcctttagataaggggacatctcatggatgttgatgggagtccgaattaagtcggttttgattgcgccgaacttattgttcttggcaaagtataaaccggctgcttgatcggtattatcaagttgttgctttagcacttgataactaggaattggttcggatttcattaacgcagcaaaatagcccgcgccaattccagcagcgagcgccatacagattaagccaattgagatcccatagagaaaaatactcttaatggcttcaaagaagacgttaatcttaaaagagagtggtgattggctcaactcttggatgtaggctcttttttgttccttagttggttgtgcagaacgtttatcgggtaaatggagcaaatgtgcgagtctgtctttagcagatgtcaatagcgttgagaccttttgtctgctcgactggagcagtgctcgccatcgactggaacggtgctttggatcattcaaataataacgccaccttttttctcatactgtcccatattatataatagttcagcgcattatcatacccgatttcggatttgtaagacaaatgaaaaatatccagaaatgcacggcaatcaatgaatatagtgcaattggttaaccaatttgaatcagcagacacaaaaaggggggcgtttgctagcgattaaaagtaagcttttaacgaaatgccgtgaaaacgctaaacgttaggtataccaattatttagcgcgttttttagcgtcaaaaggcttgcaattgaaattttagccgtttataattggactataccaataaacgacttgaatttttaaatgatgaggagataatcatgatgaaaattattaaagtgaaagatcaagtagaaggcggccaaaaaagctttgaaatcttcaaagaaggtttagcaaacaacgctaaagtattcggtttggcaactggtagttcaccaattaaattctacgaaacattagtggctagcgacttagatttcacaggttgcacatccgtgaacttggacgaatatgttggcttatcagctgatgacgaccaaagttaccactatttcatgaagaagaacttattcgacaagaaaccatttactaaatcatacttaccaaacggcttagcaagcgacatttctgctgaattaaaacgctatgaccaagtgattgctgataacccagttgatatccaaatcttagggatcggccaaaacggtcacatcggcttcaatgaacccggtgctgcgtttgacagcaatacacaagaagtgcaattaacagaatcaacaatcaaagctaacgcacgtttcttcgaaaatgaagcagatgtaccaacaaaagcaatctcaatggggattggctcaatcttaaaagctaagaaaatcgtcttgttcgcatatggcaaatcaaaagctgaagccatcaaaggcacagtagaaggcccacaaacaacagacgtcccagcaagtgcattacaactacacgacgacgtgacaatcatcgtagacgaagcagcagcaagcttgttaagcaaatagagtgcgacagcaggcggttatgctctgaggattagtggcatatcgtgaatgagcggcaaagccgatcgttttcgatatgtaactaaccggaagagtatgcctgatggagcccgtttcaaaataagagtgcgtttgaaacgggtatcttctgagcattaactggatttgacgaattgacgatgaaatcgtcgatttgccaaatttggttaagcgcaggaagatatttcaaaaagcccgtttcaaaacagagtgcgtagccagccgggtatatcccgaggattaacacaggatggcgaatgattgcgtcagcaatcgtttgacattcagggttaaccgcaaggatatggatgacggagcacatttccaccacaaaaaaatcccccacatcaaatcacgatgtgggggattttttgattgcattatttcaatgttgccatcactttagccattgcggcttgttgataggcgattgctgcttttttagcaaccgcttgttgttgatcagcagtcattgctggattggcttgcatagcagccatcacagcttgtttaccggcattttctgcgccagttttaagttgtgcttgttgaccttttaatgctttagcgagttgtttagcttgaacatcacttagaacgaaccagcctttagcaaccttaaatgtgttgtgacgacttacgaattcgtggtcgttaccagaaattccgaaccagaatttagccgtattattttgataaacgcggtatttggtggttgtcactaagactgctttatcagcatttttttgaacactgttggttgtcttttcagtttgggttgctttgggtttactttggttggcatcggtccgataaagatagactttttcagtgccgttaccaagtgggtgatagagaagcattgacatgcccttcgcatctgcgcttgaaacgagcgtgtgcgtcttagtttcggtcacagttttcattccgtaatgattgtgatcattttggacgatgaaaacgagtgaagcgataaatgtgagtccaaagatggtcattaagattggtcgccacatcttttgaccgaaaatcgatgaaaagaataatgcgagtgtgctgataacgagtgtaatgacgatcatgccttggcacccccattaatcgtagatttctttgaagagaggaagaatgtgatgatgaagccaatcacacagaaaatcacagcaacgatgaaggctgcgtgataaccagaaagggtggcatcaatcatcttatcgcggaaggccaatggtaatgtcttgaccatgtgtgtgcttggcatattgccttttgtaacactagaaagcacactgattaaaatggctgttccgattgagctggcaacttggcggaaagtattattaacagctgtcccatgactaattaagttcattggtaaagcgttcattccggaagttgtgacaggcatcatcaccattgaaatcccaaacatccggacagcgtataacacaacgatgtagatgattggggtagtagctgttaggaagatgaatggcgcagttgcagccatcaataagaacatcccggtcattgctaagcgtttggcaccatatttatcaaaaatacggcccgtaattggcatcataatccccatcatgagggaaccagctaataacgttaagcctgaatggaaggcagattcgccacgaatgttttgaatgtatagtggcaagaccatttcggcaccgaccatcgccatgttcgtcacaccacttaaaatagcggcaattgtgaagacaggtgatttgaaaacgcggagttccaagaatgggttttccatcgtgagttggcgccagatgaataaagcaattaccacaacgccaattgctaaggttgtgagaacgagcgcatcgccccagcctttatcgccaacttctgagaagccataaagcaagctcccgaagccgacagttgataaaataattgaagggacatcaattttaggttttgaaagttgaataacactcttcatttggaaactagcgaggactaagacgagaatcacgattggaataatcatgccgaataaaacacgccagttgtatgaatcgataatccagcctgaaagggtaggccctaaagcaggtgccaggccgataacaatcccggccatccccatggctgttccccgtttttcaggtgggaagatggtgagcataatggtttgcaaaatgggcattgaaatcccaacaccagcagcttgaacaagccggccgattaatagagttgcaaatgagctcgttggtgcgatgtaacagataatagtcccgattaagaagacagtcattgctgacatgtagaggacttttgaattgaatcggttaattaaccaagcactaatggggatcataatcccgttgactagtaagaaaccggttgtgagccattgaacggctgaggtggacacatcgaatgctttcattaatgtggggaaagcagttgataaaatcgtctggttcaagacggtacagaaagtaccaatcaataagaccaagactaagactgtccgattatatggtttcccatgaatatctaatggtctagcgtctgacaagataaaaatctcctttgtgtgtttttgttgatgcgatttattagtttagacgcatttggtatctttgtcaagtaagttgacaaaggtgttatttaacttgacaatcccaatagattatctataatgaaaaataataataggaatggagtggggacttgcaaaaagacctttttttaaagttaatagatacggatcgattgatttttgggattagtgaagtttgtaaaatggcgggggttacaccgcgtcaactccgctactgggagcaaaaaggatacattaaagcgcgtgaattggatggcaataaggcccgcgagtacgacgcgcaaacaatgattaaggcgatctttatcaagcatttcttagatgaaggctacacgctaggggttgctgtacagaaaattcaaaaacacatggataacatgaaggttgttcgttcgataattcgggaacattttgaggggattgaagagattgatggcgaaatggctgttaatctcggttacttcgatgaaacaaagcaacaaatcttatacgcaattgtcaaagatgggcattcaacgtttaagctgatgcctgctgataaatgaaggcaatcaaaaaaacggtccaaagcgattaagctttggaccgtttttgattgctaaatgtgttctatcagccatatccttccggttaaccctgagccgcaaacgattgctacgcaatcattcacaactttgtattaatcctcggtggatacccgacttacgtcacactctaccttgttaatctgtaaattgcatctgcatagattgcaatggcattcatgatatcttcaatgtgcatatattcatttgcttgatgcatcacattttcgcgttcttctggtaaggcaccgaaagcaacaccacgttctaagatacgaccatatgtgccaccaccgataacttgttcgtgacctttaagaccagtttgttcttcgaagacgcttaataatgttgcaaccaatggatcgtcaccaggcacgtaatgtggttcttgtgcatgaccgtcaattgttacgtcagcaagatcactaagtgtgtttgctaaaccgtcgcgtgtgctttcagcagtcacacctttaggataacggacgttcaagagcactgttgctacaccatcttgtgtgtagttgaagactgcaggacatgctgttaagtcgcccatcacatcatctgtgtggttgatgtttaagaggtgcccacgtgaatcttcgtgcattaagcgggcaattgttccgatgtagttgccacctttagtatctaaggcaaagtcagctaagaaagttgccaagtgtgttgcagcatttacgccggcttttggttcttgagcatgtgaacctttaccgattaagtcgatgattgtttggtcaccgtcagttgtgattgtcccttgtaacttgtggtcggcaacataggcgtcaaacttagcttggaaatcagctggcattgcacccgttaagatggctttagctgtttgtggcaccatgttggcgcgtaaaccagatttgaagctaaccaatgtcatatcgccatcagcaccgtcaactggtttgaaagtcatgaggtatgacacaatccctttttcaccattgatgattgggaagtttgcatctggcgaaattgcaaagtcaggttttggttcaacttcgaggtaacggttgatcccaacccattcactttcttcgtcagtcccaacgataaagtgcacttttttgtttaattcgataccgttgtcttttaataatttcaaagcataatatgctgcgattgaaggccccttatcatctgatgaaccgcgggcataaatcttaccgtctttgatcactggttcaaatgggtttgtttcccaaccgtcaccggcaggcacaacgtccatatgacctaaaatcccgaatatttcgtcgccactaccgagttcaatgcgacctgcaacgttttcaacattctttgttgtaaaaccgtcgcggtcagcgattgctaagaattgtagcaaggcatcgcgggggccagggccaagtggtgcgtcgtcttctttatggtcaacgtcgcgcgcactattaatcttgagtaaacttgttaagtcagcaagcatttgatccttatactttgctgcttcttgttgccaattcaatgtcattgcagtcccagctttcattgttaaattttaaccaaaaaacggttaattaattattaatctattcacattttagcatattattacaaatttaaaaagcgcttgccattaaaaaataaaaggttcacaaagtctccatgaaccctttaaggttagtgcttctttaaaatccgaagtgcgtttaaaatcgcgattaacgttaccccgacatcggcgaaaacggcttcccacattgtggcaattccaaaggcgcctaataataagaagatgcctttgaccactaatgcgaaaatgatgttttgccaaacgatgcggcgggtgtacttggcgatcgaaatcgcagttgctaattttgtcggttcatcggacatcaagacgatatcggcagcttcaatagcggcgtcagaacctaacccgcccatagcaacgcccacgtcggcacgggctaaaacgggtgtgtcgttgattccgtcaccaacaaagacgatttttccgttggtagcgcggtcttctgtgagtttggcgacggcggccactttatcttgcggcagaagttcgctttgatacttatcgatacctaagacggcgctgacttgttgcgcaacgggttggttatcgccagtcaacataattgtttgatgaatcccggcgtgttttagctgcgcgacagccgtttgtgcatctggtttgacggtgtccgcaatgacgatataccccaagtagcggttgttgtaagcaacatggacactggtgcccacttcactaggtgtgagtgttgcgatgccactggcttgtaaccaactagccttaccagcttgtaaaagttgtccgttgagttgcccgctaatcccgtgaccagcggtttcttggacgtcagataacgtctttgtgagtggcgtttggttagctgctaaaatcgattgaccaattggatgggtcgagtgttgttcgacaagggcagctagtgctaaaagttcatcaggttgttgatcgaccgaatgaacggtggtgacgctgaaactaccttgggtcaatgtcccagtcttgtcgaaaacaacggtttggacatcgtttaaagcttcgagataattactccctttaaccaggatgccgtttttagaagccgttccaatcccagcgaaaaagccgagtggaattgaaatgacgagggcacatggacaagaaatcactaagaaaatcaatgcccgatagagccaatcgccaaatggagcaccgaataaaaggggcggtacaatggccatgatggctgcaatgccgacaacaattggtgtgtagactttggcaaaccgcgtgatgaagttttcagtaggcgctttttgactgcttgcattttcgacaaggtctaaaatcttagcgatggttgaatcagcataaggtttcgtgacttcaagcgttaataaacctgattggttaatcgtcccactgagtagttcatcaccaggatgaaaggcgcgaggaacagattcaccggtaatagctgaggtgtccacgtaactgtcgccggtagtaatcacaccgtcgagcgggactttttcccctggtttcaccacgatgtgttcgccaacctgaattgcttcgggtgcaacaacttcggtggtgccatcagccgctaaccgattggcgatggttggtttaattgccactaagttagcaattgagcgccgggaatgattaaccgctaatgattggaaatattcaccaacttgatagaataacatgacaccaacggcttcggcatattgtccgattccaaaggccccaatggttgcaattgacattaagaaatgctcatcgaaccattcgccgtggagaatatttttgattgcggtccagacgatatcgtagccgatgactacaaaggcagctaggagcaacgtggttttagctggcgcgcttagagggacaagataagaaatcgccaagcctaaagagctgacgagaattcggatgagatcataattaatcgcatgttttgcgggggatggttctggggttggtgattgttgaatccccacatctggttcaatggttggcaaaagagtagcgagttgttgttcgaattccgtaacagcttcttggccggtcagttcatagtttaatttttgagtggtgaaattgacggagcaacttttaacgttggccatcttgttaacgttcttttcaattttagtagcacatgcggcacaatcgatgccggttaattgaagttgtgccatgttatttaggcctccttgttgagtgaaaagctaaatcgtaatctttactaaataaacaaacatatgagcatatattcatatgttgactataagataccaccaaacacgatagaatgcaatcgagatgatgggtttgggacattaaaaaaagcaccgaccaaagtgaatttgatcggtgtcaataggatccttagtgttcgttgacgtgggcgataacttgcgaaaagatattgatgacatggttgtcagctaatgaatagaaaacttccttgccttctttacgactttttaccagtttcgcttgcttgagtgcacgtaattgatgtgaaattgaggattgcgacatctctaacacactgacaatatcgctcacccgcaattcggattgaaagagggcgtacaagattttagcgcgtgttttatcgcctagtattttaaaaagaattgagatgtgatcaagtgtttcttcctttggaagagtattttggacggaacgaatcaattgttcataatcggatgtcataaaaggtgacctcgttagaatttaatggtagttagttgtagagaacgggcaaactggttaaacagttgcgtgtcgactggtggttgttggggcaattgcagtggcagtgctgggttaatcagtaagttggttggccgcaattgttggggaatttcacggtaaaagtgggttaccatcagcgattggtttgggttgaagtcgattaatgcttggcgactcttgaaccaaccactagcgactttcaaccagacttgattaccaacatagcgcactcctaaaatttgctgttgtgaattggcactaagataaccggttgtctgggtggggtgtagcggattattccaagtagcgacaatgttcgcagttggtttaatctgcgccgttttacccaccaataaagcagcggctttcgctgtttcaccgacgttgatgctgtcgctgaggacaaagcggttagtgccaatgcggtagtaagtttgatcggcaattgtaacggcttcggtgatgttgtagatatggcccgctttagccggctttttattgagggttggttcatatggattttcaacggtggggaggtcttgaacgtcattgacttgcccaattgtgtcgatggcttcactttctgcttgatcctgtgcggcctgatagtggcgtcccagtgccggatagttcgtgaccacgccgtcgacatttaggttgactaaccagttccaagtcgcttggttttcagacatctcattccagacatacactttttgatggagataatggagctgtttaatgatggttggggtgacgagggatgatgagatgttaatcccgtcggcgtatttaaaactctcgaatgagatccgctgtaaactgccaacgataaaaatgcggggaatctctggcattaaacgttgcatgttttgcagactagcgagggaaaaggaatggaccataacgcggtcttgcatgtgatattgttgaatcagcgccacgagttttgcttccatgtcctgcggatttccctttttggttttcttggtttcgatgaggaatttcgcatttgggttgttttgatagtgctcaaataattgatcgacgctgtgtggtggttccccgttactcattttgagttcactgagcttggcaaaagtattttgcgaaacaatcgcatcggtccccgtgacgcgttgtaagttacggtcgtgggagatgactaagacgccatcttgagattcgtgtaaatcgagttcgacatagttagcgccttgcgaaaaggccatgtcgatactttgaaatgtttcttcgggtgcgttgatggggtcgccacgatgagcgacaacggtaaaaccggttaaaaaccagaaacaaaggcttgttaatactaaaagcccccatcgtgaatgttgctgtgacaaatcaatggcctcctcaattgataaaaactactctttttaagataccattattcctttcaaatgcctacgattgttacagaactttaaagaaacggataaataaattaaaaataacaattgacaacgcttacattaggcggtatattatgtttgtaaggtacttatgcaattacctttttatcaattctctttctctcttatgccaaccactatctgcgggtagtggtttttttgtgtacatattggtagaataaacgtaactgaaatcggattagaataggaagtaacacaatggcggagaagtaccaaacatttgatattattgaagaaattacgcgcttagatggcacaacgtattatgaattggctaacatctttatgaatgggcgtgccgaactagcggctaaccggggatttattaagcaagtccggattttacaactcaacattccgcattcgaatgcggtccaaacttacgaagcttacattaatgaacgttacacaatgcctgcggttgattttgaccactgggaagaatgggaaaaagaagacggcgcagttgcgcaagcctttcaggagattttaaaagcaaatcatattggttaggtgggattgtgaatgatttatttcacagcggatacgcatttttttcacgccgaattattaggtaataatgattttgcgccgcgtccgtttaaagatgtagctacgatgaatgcaacgattattgctaactggaatcaacgggtgcaagctgacgaccaggtttatttgttgggtgacgtcgcaatggtgcccaataagccgagtgcttttgccgaagtcgctgctgtgttagagcagttgaatgggcagctgattattattaaaggtaatcatgataaccgtgcttttttgaaatatttggcgaaacatgatgcgggattatcagctggcaaggcgtattatcaatttgctgatgtcggtgagctaattaagatcaatcaccatcagtattttttaacccactatccgttattattgggaaaggtccaacagacgttcaacttgcacggacatattcatcattatatgttgccgattgcagagaatatcaatgtcgggattgatgcaccagagcgcgaattattacctgaacgggtgccgtttggaacaccccttgcggcaaatgagattgaaatcatttttgaacgcaaacaagccgcgctggcaaaccccagccacgactagctgaagggagtaagcaaaatggaaacaattcatattttacacacgaatgacttacattcacattttgaaaattggcccagaatgcggcgcttcctcttagaacatcaagcagcataccgaaagcaaggggatacggtcttgaccttcgacatcggggatgcaatggatcgtagtcatccattgactgaagcaacgaatggtcagattaataccgagttactcaatcaaattgggtatgacggagtaacgattggaaacaatgaaggaatcggtaatagtcatgctgatctggaacatttgtatgataaggcgaatttcccggtattactggctaatctgtatgaacaagcaacaaacgaaaggccagcatttgcgcaatcttaccgactaatgacgaccgatgctggaacgcgggtagcaattattgccttgaccgcaccatttttcttaacttatcggccgaatggttgggaaccgacgactgtcagtgaagagttgccgcggcaattagcggcgattgaaggtcaatatgacatcttaatcgtcctatcacatcttgggattacgactgataagtggctgacggaacaattccctgagattgatgtcgtctgtggtgcgcacacgcatcatcttttagaagaggggctgctggttaatcaaaccttattgacggctgccgagaagtacggtcattaccttggtgatatcacgcttgaactggatgatcagcaccatgtgatgcataaaagtgctcggacggttttaaccgcggacttaccagttgtgaagactgacgcagcagaaattgaaggctacctgaaaaaggggcacgcacaattagccgccgagcatgttgccaagttgccacacgcttttaaaatcaacgcaattggtgaatcagaaatgatgacgaccggtttaaaggcaattgaagaagcgaccagcactgaagctgccgtattgaatactggcttgttcttgcaagatttgcaggctgggattgttactaaagatgatttgcaaactcaattaccgcatccaatgcatctgattaaagtgacgctcaaagggtatgatttgtggcggatggtgcttgaaatggagaaaaaccggctctttttacgcaagtttcctattaaagggatgagtttccgtggtaaaatctttggagacatcgtttatgacgggatagcggttgatatgaaattgcggcgcgtcttttggcatgggcaagaaattgatccagaagccagctatacgttgacgaccgtcgatcattatctattcattccattctttccaacaattgagattgttggcgagaccgagatcgtgttccctgattttctcagagacgcggtcgctaaatatttaagtaaacattatcccttataagggaagaggaggttcgctgtggcggatacgaaaaacagtcccaagattgccaagaaagtgaccaaggcgattgaaaaagaaatgatcgcttcagccaaacaaccggaagtgccacaacacgttgtcatgaagactgaaaccacgcttgagattgataaatgtgcttatgaagtcgttgtgaactatcgtgaaggcttcgacgctgaaaagttgaacgaacgctataatgaagtgttggctaagtacgattatattgtggctgactggggctttgaacaactgcgtttgaagggcttttacaaagcaaccaacaaacgcgctaataaagatcaattaatcaatacgttacaagattatctatacgaatactgcaactttggttgtgcctactttgttttggaacgtcaaggcaagccaatcattaagaatgagaatcggcggagtaatcgccaacgtggtcagcaacggcgtcggcgtcaaaagccaggttttacagaacggaaagtcaccgataacaagcaaaaagtgactaaagaacgccctcaaaaggcggtaaccgagaatcaaaaatcagttaataagcgtcattttaagatccgtcctttggaacacaataaaaagtaaaacgtaattggagttagacaactatgacaaacacagattatgcagggtatttaattgatttagacggcaccgtgtatcgcggccgtgatcggatgccagaagccaaagatttcattgaacgcctacaagcaaaacaaattccgttcatgtttttgacgaacaacactacgaaatcaccagctgctgtgattcagaatttggcggataaccatgacattcatgcgacagttgaccaagtgtataccccttctttggcaacggcgcgctatctattgaatttaaacggtggtacagcgaatggcaaaacggtctacgtgattggagaactcggtttgaagcaggctctatcagatgccggttttagaaccaatgaattcgatccagactacgtggtagttggtttggattatgatgtgacttatcacaagtttgaattagcaacgttagcgattaagcgcggtgcattattcatcggcaccaatgcggatacgaatttaccaaacgaacgcgggctagtgccaggtgctggttcagtgattgcgatggttgaacgggcaacgcaacaaagtgcactctatatcggtaagcctgaaaaaatcattatggaaatggccttagagcaattcggcttgacgaaggaacaagtggtgatggttggcgataactacaatacagatatcaaggctggcttgaatgcagggatggatacgttgttagtttacactggtgtttcaacgccagaggatgtggcaaaagaagccttgcaaccaacgcatatcattaacgacttaaccgaatgggacgtttaaagcgggttagaagtaccactagttgggcggcgttgtatttggcgttagtcagcagtgcgattttaataacgttattgttaagctgggcactttatccgctagtgagtcactacctcaatctagcgagtcaacgggaattaacgcaaccgcggctgatgatgaactttaaccggttaatgggctacttacttgtgccatggcaaccacgcttacaactacctgactttccaatgtcattggatggtcggcaacattttgttgaagtgaaacgcttgtttggtttagcagtagttatttggctagtaacgattggagcggcgattcagcattggcggagtcggcgcaagaccaatcgggtttggcaatacgtccgcccaatgcaagttgctcttgtggtgccacccatattagggtttattgctagtatgaatttcgatcggtttttcattacgttccacgaattattgtttcgcaatctgaactggcagtttgatccaatcactgatccgattatcttagtgttaccggaagtctattttggcctttgttttgcactcttcttcattttgttagagggtagttttgcttggctgttatggcgcggtaaacgtgcgctataacgtttggctttttattaagaaaatgcaaaagtgattgctttgatgcatggattcggtatcctaataagggatatatttttaaattgaaaaagagtataggagaaatcgcatgacgcagttaattgattttgttttacatattgattcccacctggtcaacattgttaatcagttcggcaactggacctatgtcatcttgtttgccattatctttgttgaaaccggggcggttatcttaccgtttctaccgggggactcgcttttatttgccgctgctgctttggcagcccggactgataatgacttgaatgtctggctgtttgctgccttgttcttaatcgcctcaattgcgggtgattcattgaatgaacaaattggccaacgggtcggtttagccgccacgaagaatcggttcttcggcaagtttatcaataccgagaaaattgaagaggcgcaggtcttctttgataagtatggtggtaaaaccattgcaattggccgtttcatgccgattattagaacattcgttccatttgttgccggtgggagccagatggccttcatgaagttcttccgttacgacgtgattgggagtatcttgtgggtgacactctgttgcggagctggttacttcttcggaaacattgctgttgtgcgtgaacatttctcactcgttgtgttagggattatcggggtctcattgattccgatggttatcacagcggttaagagtcaaatgaaaaaaaataatgcttaataaaatactaaaaagtcctacatcaacggttaaaacgttgatgcagggcttttttaaaacgtgctttagctagcaacttcttccgtttagccacggtttgcaaacggtcggctgtgcggctcattcactaaccgatgctatactcagaagctaaccgctagttaaagcactcttatcgaaacgtgctccataagccaccttcttccggttagctacggccagtaaatcatcgactgcgtcgctaatttactggactaggctaatcctcagaaggtaatcgggcatattgcgcactcttacataatggacgtgctgtgtagtggttggcgtttttctgggtagagattcgttagtaactcagtcacagccattggtgcttcaccaaatccgctggcaattaacttcactttaccagggtaggtagcaatatcgccgatcgcatagatgttcgggatgttcgtctcgagttgttggttaacagcgacttgatggtggtccaatgttaatccccaatcacggagaattcgagtatcagagataaacccatagttaacaaggagtttgtcaattgttagctgctcttgatcggttgatttcatcttatttaaagttaatgcgagttgttggttcatttcggtcaaactatcgattaaaaacggcgtcttaatttggacagttgattgtttgagtgcttcaacgctactttcaagcccgcggaattgatcccgacggtgaattaaatagacttgtttagccactttttcgagcattagtgcccattcaatggccgaatcaccaccgccagcaacggcaacggtttgatctttgaactgcgccatttcttttgcgaagtagtgaatatagtgattttcccattctggatcgtaatcgacagcgagtttccgcggtgtgaaagccccgttcccaacggcaatgatgatgcctttggtgcgtgtcgtgcccttcgttgttttaagaacgaaagtcccatcttcttggggttcgataccttgcacagcagtggataattgcaaggttggttggaaaagtgccagctgttcaattaagttttcggtgagctgtgcaccagagataccactgaaaccagcgacatcatagatttgcttttctggatagagtgttgcgacttgaccaccgagttcggggagactttcgataatctgaacatcggccttgcgcataccagcataataggcagcaaacattccgacaggaccgccgccaataatggtgatatcaaagagatgatttgaatcaagcatgagataacttccttaatagtagatttcttaaattagtatactagaaaaaaataaggaaagcatgtttaatgaaataatcgtagtaatttatgaagcaattcgctatcataatgattgtgagttaaaacaaggaggacgattaaatgacatatccacaattagaccttgcaaactttgcagggccaacagctacttttgacacaaaccgtggcaaatttacagtagcacttttccaagaccaagcacctaagacagtagaaaactttatcggcttagctgaaaaagattactatgacggtgtgattttccaccgggtcatcaacgatttcatgattcaaggtggcgatccaaccggtactgggatgggtggcgaaagtctctggggccaacctttcgaagatgaattcaaccaagaagtctttaacttaaatggtgcattatcaatggctaatgctggtcctaatacgaacggcagccaattcttcatcgtaacaaacgaacatatcaaccaaaacatgttgtcacaaatgccaggtgctggttacccagaagaagtcattacggcttatgaaaagggtggtacaccttggttagattttaaacatactgtatttggtcacgtcttgagtgggatggacgttgttaataagatcaacgctacagaaacaggaatgcaagacaaaccagttgaagaagttatcatcaatcacattacgattaatcattaattttaattgaagaggtgttttagatgctagtaggtggaattgaaggagggggcacgaagtttgtctgtgccgtaacagatggaaaaaatgggatacaagaacgaattagtatgccaaccgagacgccggaacaaacgatgccacggttatttgaatattttgatcaattcgatcatttagatgccattggtttggcatcgtttggcccaattgatgttaacccgaaatcaaaaacatatggctcaatcatcgatacacccaaagcagggtgggaacactatgatatcttaggagcaatgaaagctcattatcctgatacccagtttgcttttacaacggatgtgaatgccgcagcctatggtgaattgaagatgggcgctgctgatggacttgatagttgtgtttacttaactgtcgggacggggattggtggcggtgttgttgaacacggtcagattttacaaggttacagccatcctgaaatcggccacatgttaattcggcaacaaccagaagattcatacgaagggacatgtccttatcaccacaattgtttggaaggcttaggagctggtccagcaatcgaacgccgttggggcaagaaaggccacttattgccggctgatcatcaagcatggcaaatggaagctgactatttagctcaagcctgtgtaaatattgctttaatgctatcgccagaacgaattgtcttcggtggtggggtgtcgaaacaagcccaactattcccaatgattcgtgaatcctttaaacgtcaaatggcaggttatgtgcaaacgcctgaccttgatgactacatcgtgcatgttgcattaggggatgacgctgggattactggggcacttttactagcagctgatcaactttagttaaatgagaacctgagggatgtttcctcaggttctttttacatattatagaaggaattgtataaaaggtcttagccgatagcttgccttttactaactggaaggcttaaaatagataggaatattgaaatggaggaaaatatgggttatcgaattggacaaaagattacaggtactgtaacaggcattcaaccatatggtgtatttgtttcattagatgcaacggtccaaggcttaatccacatctcagaatgtggtcatggttttgttaaagcgttagatgaacagtttaaagtcggtcaagtgttagatgtattagtgttagatatcgatgaatacacacataagattagtttgtcgttacgtgcgctacataaagcacaagatttagcaccacagcgtgctaagaaacactattggacaaatcgccggattcatattgggtttgcgcccattgcagaacgattaccaagatggactgaagaagcgatagaagacttgaataagggtgagaatgtatgagtgctaaagtagccggaacgattatgtataagacagagcaaggacaatatgattttttggtccaaccacaagttgatgcttcttataagatgctagtgaccaataagcaagatgatcaaacaccacttgctgctgtattaattgcaatccaagcacagctaaatattgatgttaacgaattgagattgatcaatttagcgaatattaaccttgaaggtgagaacgtttcgttctttgtctttcagtggggagctcatgagactgatttttataccgaacaattgagaataattagtgaagccggttttcgatttgcgaaccctagtgagttcacggaattactggataagttagaagtcacgagtgtcccgcacttgaattagttcggacaatcggtgaatatctattcaacaatgtacgcttttgaaactttttatatttttattcaaaaaaaagtaaacaatcgcttgacgatgtcttggattgttggtatagtattctatgttgtcagcgagagaaaagctcattgctaacgaaataacgggtcaaacgagattgaataaatattcaaaaaatatttatacgaattaaaacaaaactgggttgtaaaagtccgattgaatatcgaatttttacaacccagaaagctgcttaaagtttcgtccaatatttggggttcacttcatagcccttttttttactaatcctcagaagagaaccggtttattatctactctattttggttggttgaccataatatcgtcaatcaaaccgtaatcttttgcttcttgcgctgtcatgtagttatcacgatcagtgtcagcttgtaatttttcgaaggtttggcctgagttgtctgccaaaatttggtttaaacgtttccgagtcttcaaaatttcgcgcgctgcgatttcaatttcagtttgttggccttgtgcaccacctaaaggttggtgaatcaagacagttgagttaggcaatgcaaaacgtttgccctttgtcccagctgaaagtaaaacactggccatagaagcagccatccccattgcgattgtttggacatcagacttgatgaagttcatcgtatccatgatggctaaccctgcggtcacagaaccaccaggtgagttaatgtagattgagatgtccttatctgaatcttgcgcgtccaagaataataattgcgcaatgattgtgttagccatttggtcgttcacttcaccagataacatgataatccggtcttttagtaaacgagagtaaatatcgtaagcacgttcgccacgagatgtttgttcgataactgtcggtactaacattgaattgcctccttatataagccagagtagaatcactctgtagtctataaattgaattttacagcaaaggtcaattttggtcaaatagaaagcctcttttcagaaagattatggtcattttgtgttcgaactgaaaatatggtatacttaggaaagttaatcagcacttatcactgtagtatcaagtattatttgaagactttaatcaactggagtaaccatggagttacaagtagtgtaaagaggcggcttacgctgtttaaacgagaagatatttagaaacacaagaatttagacataattgaattaacccaaaaataaaagcgacgtgaatcacacgtcatctccactagccattcgatgctagtgtgcgtagccaattagtgactggctacctgacattatgtaagaatttaatatgcgaaattaattagaaggccacctaggaataggtggcctttgtcaatggtttaaagattgagttgttcatgaggaggactcaatcttttttaggttatatttgtaagcgctattgtcaaaatgataatcgcgtgctattatatgaaattgaaccggttcaattctattcaataaagggagaaatgactgtgaaattcgtagataaactgtcagaaaagatgttgccgtttgtttctaaactcaataattagcggcatctaattgcaattcgggatagcttcattgtgacaatgccacttgttatggcggcctcgcttatggttttattaaatgcgctaattttctcaaacgccgctgttcaaaagattgttgatttaagcggattagctgatctagcaacaattgtgaataatgggacgatgagtattttatcaattgtggtctgttataacatcggtgctaatttagcaacgcattatgttcgctctgggaaagtgaacgatcctgcatttagtgcagttcatgctggtattttaagtttggcaacaatgtttattttgatgcctgtgacgagttccgtcactttagcaaatgggaaaacggcggaagcaacagacgttttcttgcaaagtttaacctcgtcatcaggacttgcaacagcgatgttagcagcattgattagtacggagttattcattcgttttacaaagtttgaaaaaatacgaatcaagatgccagaaggcgtgccaccagcagttgcaacctcgtttaattcattggtcccagaagtcttggttgttttgatttttgctatttttgtatttattttaaatgtgacaaccgggttgaacgtccctcaattaatcgaccttgcgattcaaacgccactaaaatcgtttgtattatctgtaccaggtacgttattcttacaattcttctcagatttcttatgggtctttgggatgcatggttctagcattttagcaccagttcgccaagcaccattgctacaagccattcaagaaaatatggcggccttttcagcaggacatgcgattccaaatattattacagaaccttttacaaatgcgttcggcttgattggtgggggcggttatatcttaccgttagtgattgccatcttatgggcttcacggcggaaagatcaacggcaagttgctaaattagggttaacaacttgtttcttcaatattacagaacctgttatgttcgggttaccagttgttatgaacccaatcttcatgattccatgtgctatcattccatcaatcaatttagtgattgcttattttgcaacaagcttaggtttgattagtaaaacggtagcggctgcaccatggattacaccgcctgttattcaatctttcttggcaactggcgatgattaccgagcagcgattttaaccatcttattaattggtttagatgtctttttattcttaccatttgtcattgcaagtaacaaagtattaactgaggaatgaggtttttgaaatgcagtatccatatcaagacgcagcgctgaccattcgtgagcgggtcactgatttactttcacgcatgagtacgcaggaaaaaattggtcaagtgaatcaacatctttatggatgggaaactttcgaagattctcagtcattaacgtttacagaaaaattcaaggcgcatgttgaatggggcggcggtgtcggtgcactttatggtttatttcgcccagatccatggtcaaaagtgaactttgaaaatggcgttcgtgcacaggatagttggcgagttgctaataaagttcaagaatatgtcatggcgcattcacgctgggggattccagcattaattgttgaagaatgtcctcatggccatcaagggcttgaaggaatctcgtatccaacgaatattggccgcggcaatatgtttaatacgcggttaatgcagcaatcatcgcatttgatggcacaagaactagcgcttaaaggcgttaacctagcgcttgtttcgacgcttgatttggtcaaagatccacgttggggccgttcagaagaatgttttggtgaagatcccattttagcggcgcgaatgagtgaagccgttgtggcgggttttcaaggggatttaattcaaagtgatgttgctttcttagaccaacctgctaaaccgcgaacgactgatgccattggtgttgtattgaaacactgtattgcgcaaggtgaagcattgggtggccataattcaggcaccgtcacaattggccaacgtgaattttcagacgtctatgaaccccttttgagtagtgtcaagaatgcggcaggtgtgatggctgcttataacgatgtggatggggtaccgtgtcatatcaatcagccgttgttgactcaagatttacgggatgtaaatgggtttcaagggattgtgatggcagatggtgttgcgcttgatcggttatcaggaatctttgaaacacaaccagaagctgcggcggcagccttaaatgcaggtgtcgatctaagtttatgggatcagacattcctaacgcttgatcaagccattgaaaatggcctagtagacgaagctgccttagataatgctgctggccgagtactagcgttgaaattcctgttgggtctgtttgaacaaccctatgtacaagccccgaatgcgcaattgacggccttacttgaaaaatctgatgcgctgaatctgcaagtggcacgtgaaagcatgacgcttgttaagaacaatgggcttttaccaatccggaatcagccgcaaaagattgcggtgattggccccaatgctgatgaattatataatctcttgggggattatacagcagcacaaagttcagcgcgtcaagcgcaaacaatttatcaagcgattcaagaaatgtttcccgagtcggaagtcgtgtatgcattaggctgtgaggtgcgtaattcaattcatcaagaagaggcaattgccaaagtagttgagcttgcgcgcgatgccgatttaatcatccctgtattaggtggttccagtgcacgtaattttgatatggccttcctaagtaacggggcagtgagttcaaaaggcatcaacatggattctggtgaaaatgttgatgtcgcatcacttagtctggggggccaacaagaagtgctgctcaagcaattgaaagcactaggcaagccaattgcatgtgtcatggtgcaaggccggccatacgatttaacactggtaaatgaacttgcagatgctgtattgattgcttggtttcctggtcaacaaggtggtcgcgcaattgctgaaactttagtgggacttaataatccaagtggtaagttgagtgtatcttacccacgcaatacccaacaactaccggtttactactatcaacgcgatgctgctaaacaagatgattactatgatgaggttggccaaccgttatatccatttggttacggacttagttacgaccaatttgattatcgacaattagcggttaagcaaatggttgacaaactagttgtaactgttaaagtaaaaaataacggacagtttgtaggtcaagaaagtagtttattatttgtcaaattaactggtggagcagttattcaacgaacgaagctgttaaaagctttccaaaagaatgccttccaaccaggtgaagaaaagagcattactttcgaactacctgctgctgattttaattacatggatattgataatcaggtgaaacgtgcgcaagcagcgactattatggttgctgatttagcggagaaaatcactttatcgatataagcggggaataagaatgtcatctgttagagaagtcgctgaattggccggagtctcggtcggaactgtttcacggtatctgaatgggcaacagcttaaagcagctaatcaagccaagattgcagcggccattgagcaactcgattacaaacaaaatattatcgctaaaggattgaagaacaatcaaagtttttcaattggtttattgatgaatagtatttcaagtcgatttggcgcggaagttgtttctggaatagaacaacgcgttgagcaacaagggtatagtttattattgagtggttttagtgaccaaccagctttaattgatcaaaaaattgattatttaatggcgcattcgattgatggtttaattgttttcttagcaggtgaagaatggcaaggaatggaacgactagcggcacttgatattccggttgtgacgattaataacccaaatcagctacgcaatgttgattcgattttattagatgatcgcgcaagtgtggcacaagtgatgcaacaaattattgatctcggacaccagaatattgggatgattgccgctaatcaggatgattatgttgcccgtgaacgactggcaggtgctaaacagacgatggcagcttatccagacagacagttacatgtttttgaaggtgactattctcggactagcgggtaccgcggtgcccaagcattattagccgaaggtattacagctttatttgtcagcaatgataatatggcctttggtgcgctcacttatttatcagaaaatggtattcggattggccaagatttactatttggtcactatgattatgccgatgaacatcaatttggacagttgccaatcctatcgattcaaccgccaacagaagcgattggattggcagctgctaagttgttattagatcggctccaaaataagactcagtcagatggtcaaacgattttaatgcatcatgaaatcaatggtctaaactgaatcatcgaaaagggcgagtagaataatctacttgtcttttttgagtttaatccttaggttattaatttacccatccccgataatggggtacacttgtggtgtacattattttgcatgattattgaggagggcttggcgtggcacaaaaaatgattttggatttagatactgggattgatgatgcgttagcaattgcttatgcattgggatcatcagaagtcgatttaatcgggattacctcagaatacggcaacgttttgactgaacgaagcgttgtgaatagtcaacaaattttacatttattaggtcatccagacattccagtttatttaggggctgggcattcgacgacgacgcatgattttagcgtcttaccaattagtgcggaaattcatggtcaagacggcgttggtgagattcatctgacagagccccatccggaaatggcaactgaatcagccgttgattttatattacgtgcttgtcaggcgtatggggctgacttgagcatcgtggcaactggcccgatgacgaatttagcgttagcgattcaaaaagatttaccaactttgaagaaagttggtcaaatcgtgattatgggtggcgccttaacagtttgtggtaatgtgtctccatttgctgaagctaatatcagtcaagaccctgaagcggcggacttactctttaagagtggtttgccggtgacgatggtgggccttgatgtcacgttgcgcacactttttacacgcaccgatacggcagaatggcgcgcactcggtacaccagcagccaaagcttatgccgatatggttgattactatatcaaagcctatgaagtcacttctccccatttacacggctgtgccttacatgatcccttagcagtcgctgttgcaatcgatcctagcttagtcacgactttcccattgaacttgaagactgagatagaaggcccgtcacgtggacgaacaattggggataatgcccgcctagatgatccagcaacgcggacggcggtttgtgtacaagttgatacgccgcgtttcttaactgaatttaaatcaagaattggacaattattagcgcagtagaatgagccatatagaatttcaaaaaagagctacgacaaaagtcaattttttgtcgtggctctttttttattgtacaggcgactagcaagaataagtcggctaacatgtagtgtgaatcatgattgctgagccagtcaattccttgattggcgatggcaaaagctttttgaaagtggtgatcttgatagagtgccagactatacaggtagaataagatattaatgttctcgtcatagtgcgtgaaccgccctgcattcacaattgcgaggacgtgttcgaagtcagtttgattagtatggggcgtactcttaataaagctgatactactgagaatcaaaatctcagtaggcgttaaaacttgttggcgcggtgtaaacgtatagtcgagtgccatttgtagttcccgtaaactatccgtggttgtatgaagttcttggaatactgcgatgccatgatagtagtagtaggtctgtaaatcggtcgccagttcaaggtgttcggccaagccagtcgtatccaaataatctaacataccgcgataatcgtgtgcattgcacagttgtttaatttgttgattgaattcgggttgttgatcaatttcgggataatgacttaacagcgcttgttctaacggcatattaagccgttcgcagagttttgctaacaaaatggcgtttggaatataagtgccgttttcaatatgactaatcatcggttgcgaacaaatatcctgggctaattgatgttgggacaagccttgcgcacgacgaaccgtagcgagtttacgccccatggtcgcggcaagtagattatcgggaatagctggcactactaacacctcacttcatatgattgctttaaatttaacatgcaattttcaaaaagaaaaggagctggactggatgccagtattgattattatattagggtttgcgtttattttccaaaagccattagtgtctgcagttaccattgtgtttggcgcgctattgggtctttggttactcagaggaataatcgtcttgatgatgttgataacacttggccattattggcgtcagaaaaattaaaaaagaccgctgaataagcggtctttttgattgcttagaattgatagtccgggtcaataatcaaaacgggtttgattgtttcacctttaatagaggcttcgttggcagtgttgatgtcttcgaattgataaaatttttcggttttatcaaaggggaacatgccttgacggtagaattcgattaaacgagggacgtcgatttgcggaatggagtcacccatgttgacgccgacgacggatttgtcgttgacacataagtcgttccaagtatcaagatcgatgtggtttggggttacggcaattgttgctgacaccccaccttagcaaagcgccttaattgaatcttccatgactggtgtaatccccgtggtatcgacacagaagttcacgccgcgcccatttgtgagggcttggattgctgcgacaacgtcgtctgtttgacgactgttaatcgtatcggttgcaccgagttctttagcgagtgcgagccggtcgtcgatgatatcgacagcgatcactttcgtacagcccgaaattttaccggccatcatggctgcgagtccaacagcaccagtcccgaagacggcgattgtgtcgccaggttttggttttaaagtatttaaaacagtgccactaccggtcacgtatccacaaccgagtggtccgagtttgcgtaagtctaaatcgtcagggactttaaccgcatttcgttcgcggacaacggttgtggttgtgaatgaagattgatcgaacatatcggcaacgtgatggtcattttcagtaaagtgggaactaccatcagggcgcacgccggataagttattttctgcgtagttgaggcattgtgttggaacgcctttgagacagttttcacagatgccacatgcgtagaatgagagaacgacatggtcgccaacttttaaactttgaacgtttgaaccgactttttcaataattccggaaccttcgtggccgaggacgattggatagccaataatggcgtcgcctttacgaagcgcttcgtctgagtgacaaatcccactagccaccatgtggacttgaacgtcgtctgggtggagtggtgcgagttcgatgttatctttaatgacaaatggtgcgccttgttgttcaacaacagctgctttaattttcatgcaatgatcttctaacttaattatttaattcacaagattattatagcattgttgaagtcgttttcaattaaaaattgacattggcgctaaaattgccaaccatgttgttctaagtcccactggcgcttaggcagaccactcacatacgggttaccagcgacataatagcgataaggaagttgaccactcgctgctttataattgaccccgattcgtggcgcggtgacaattgatttgaggtggcgacgatgcgctaaatcaatcattaaaggggcgtccgccacattttgaaaagtcagttgtttatcgtgaatgccgagggcgcccattaatttaccggggccgttagtcagttcgacgccaggtttcgggcgattgaggcgcatttgttcaatgccgtgggtcggttcgatggcgcgaatcaagacgccttgtggttgatccactgcttgggtcacgatatcaaatagaaagaaaccgcgtaattgatagatataaattgtaccaggctcatgatagagcggctcgctaaaggatgtgcggcgcccattgtaagcatgcgcggcagtgtcatcggtgccgacataggcttctgcttccacaatgaggccgccaagtgtgccttggtggctggtataaagcaagtgagttcctaataaatcttgcgcgatggcttgggtagaccggttcgtaaaaaatgatggtgctgctggttggcttggtgtcataattaaaacctccgagttaaaacgaatcagctttattttaacaccaaagacatgacatttgtcatctgtaagtcatgacaaaatcgtctaacgacaaaacggaatcacttctatactagggttattaaatgaggtgatgacaatgattgaaattaaacaagtgacaatgcaattcgaacaacaagttgttttaaatcaggtagacttaagtgttcaacctggtgagattgttggcttagtgggtgcaaacggcgccggcaagtcaacattgattaatttaattttaggccgactccaaccaacggctggcgagattcggattttaggtcagaagccaacggagaaagaacatttcaacttattgggtgcgatgatgcaaggaaatgtccgattggctcgggtcagtgtcatcgaagaattagaattggtttgcagttattatcaacagccacggtcagtcactgaattattaacgctagctgatttgaaggcacaggctcataagatggtgtcccaactttcaggtggtcaattacgccgcctctcctttgctttagccatggcaggcaatccggatttgctattcttggatgaaccgaccgttggaatggatgttggcagccgacaaaaattctggcagcaaattgaacagttaaaagaagccggcaagacgattattgtcacgtcgcattatttagaggaaattgaacacattgcaacccggattttattattgaaagatggccagttccaattcgatggtgacttggcaacattacaacaacaatttaaaggaacgcagattcgctttacgactgatttaccagcagctacttttgcaaaatggccaggcgtgatccgcgtgacgaagactggggccaaggtgctgttgcaagttaccaagagcgatccgatcttaagtcaattagcaccaatgatggggatccaggttcatgatgtgcaggttcaagcaagctcattaaatgaaatttatagcgaaatgatggaggactaaaaaatgcaaacaatgatggtacaaacaaaaatagactttaaacgcgcatattggcgtaatccacgctttgttattttttcactcttaatgccgattgcgttttatctcttgtttacgaaagtaatgaaacagggtgtgatgaatgcagcattcaatcgacaatacatggtcagtatggcgacctatagtttagttctcagcaacacgtttactttatcgacattactttataatgacgcacgggatggcttggtttccttaatcgatttatcaccaaccagtcatcggacttattatggggctaagttgttgaacttaggcttaatcaatgctttaacgatcggcgtcattttcatagttgctgggattagtaatcaaattcatttagtgtggtccagttggttattaacggcgggctggttgtggtttgccagcatccccctttgtttaattgggattagcatttcatttttaacagatgaaaatcagattcaactggtgtctagtttgttagctttccccttagcaatttaagggggattatggtggccaacagaaataatgcccaaaacagctcgcgtgattggcaagcatttgccggtttatccgattaatcatattggccaagcgctgattgcgcatcaacccgcacacttgggtgaatatggcatcacgttgctctgggctgggttattactggcaattgtcgtatacttaaaccatcataaaagaggagcgatgcatgcatgaatttttttaaacgctacattgccatgccaccccaatatggattatttccatatgtttggttgattttcttgctctttccaattggttatgcgtttccgtatcgaacggtcaagcagcaagcgattatgggcttaattctgattttcttggtggggcttatcgcaatgggtatgtcgcatcgcggtatcgcacattctggattatcttacaaatggtgaccagtgcgattttagcagtcattatccaggcgttttatctgaatatttatactgcctgggtgtttggttcgattcccatgcgccgccgaagtttctggcgctattactacgcttatctgttgtcactaatcataccagcggtcaccctatattggtattatggtggtcatatgggacgcgataatctgattggcttaatggtgtacggcttgttctgcatcttttcaccatttgcggctagctcgattcagcgtttcaatcggaaaaatcgccaattaacgcagaccaatcagcgattaaccgatatgattaagcagaacgaacggcaacgaattgcaggggatttacacgataatttaggtcagtcattttcaatgattacgctaaaagcggaatatgcacgtaaattattggcgaaaaaaccggccgcggtacccgaacaactactcgagattgaacaagcctcccgtcagaatttaaaaatagtgcgtgagattgtcgctggtttacgccaagtgaccgttgctgaggaattgatcaatcaagaacggaatctcagcgttgcaggcattttactgctgactaaaaatgaagaccaacttgaagggattccacaacaaaatcaacaagtgcttgcgcaatgtttacatgaagccgtgaccaatataattcgctacagtcaggcaacggagtgttacgtggtttttaatcgaaccgcaacgacttttcagatgcagattgaagataatggtcgcggattgaaaagcgaagatcaatataagagtcatgggattgtgggcatgcgcgaacggttagaaacgattgatggagagttgatggtcgatggtcgccggggcacacagttgacgatgacggtgccacttaagatggagggaagggcatgattaaactttatttggcagaagaccagcaactattgaataccgctttagcgggcattctggatttagaggatgatttgacgatggtcggaaccgccgtcaatggacaagtcgcacttgatcagattgaaaccctccaaccagatgttgttttgttagatattgagatgccgggcatgacagggcttgagattgcgcgccaactacatacgcgtcagccacagattaaggtgattattctgacgacttttgcccaaccgagttatttcaagcaggctatcagcaccgaagtggcagggtatctattaaaagatggcccgagtgatgacttgattgtggcgattcattcggtcatgaagggcaaagttgtttatgcgccagaattagttgttgggctgacaacgcaaacgaagaatccactgtctgagcgggaaacggaagtattgcgtgcgattgctaatgggttgagtacgaaacaagccgccgaatcattatttttatcggatggaacggttcgcaattacatgtcgacgattttaagcaaattggatgcaagcaaccgcgttgaagcaattcagattgcacggcataatggctggctgtaagaggcagtaaaattgcctctatcatgattgttctctatgatgaaagcaaacaaggaggacgaaacaatggcattagcaaatttgcataaatgggcgtttttctatttttcaccagacttttcacctgaacaaaatacggtgattaaccgtaatccaatgggaacgtgcgagatgattaccgtcgggttcgatccacgtgctaaagaagatggttcaattattgaagtcgctaagcaattgaaggcagaaggcattcaatttattgaactctgtgggggcttcggaccaacctggacgactaaaattaacgaagcactagacttcgccatcccagtcggagcagtcatgtatggtccagaattcagaaaacaattgtttgaaataatgaactaaagagtgcgtcaaaagcgggtatactgcgagcattagcctaacaaggcgaatgattgctgaaagcaatcatttgacttgtgtagctaagcacagcagtatgcttttgaaagcacgtttcgaataagagtgcgttcaaaccgtttatgttctgaggattagcaaaattagacgaaaaagcggcgaagccgcttatttggctaattaggctaaacgcaggaacatggtttgaaaagcacgtttagaatgtgccgtcagtcgagaattccgtctaattaatattgtaggcctttgtaaaagttaattttacaaaggcctctttttttaggcttattatttaacttttgactgatgatttggtatactctacttattaaatgtaaggaggcgtgtcatgcaaagagggcggcagttcttaaaacttagtgttagtgcaatttttatattcggggtgttcttattatgccaagtttcgggggtgcaagccaaacaggttcttcagcttggcgcgcaagcaccactagataccattgatatctcgacttcaacgggatatggtcaaacagggaacatttatgaaagtttattccggcttggtgagaacggtaaaattgaaccaggcttagcgaaatcgagttcagtttcagctgatggtaagacgtggacatttaaactgcgtgatgccaagttcagtaatggtgacccgattcgggcgcaagattttgtctattcatggcaacggacattgaaaccagaaaccaaatcaccttatacaaaccttttcagtaatatccaaaatgccccagcgattgcaaaaggtgagatggcaccagaccaactcggcatacgggcagtggatgagcacacgttggaagtcacattatccacacctgtggcctacatgaaaaccttgatggcttatccattatttgccccacaggatcaaaaagtggttgaaaaatatggtaagaagtatgcgacaaacgcgaaatacatggtgtactctggtccgtttaagttagttaactggaatgggacgagtgagaagtggcaatttgtgaagaacaatcaatattgggatcgcaaaaaggtaaaattagaccaagtcaactataccgtgttagaaaataccagcaccgcgctttatctttatcaggaaaagaaactggatttaacccagttggataatcaacaaattgataattatcgggatgataaagcattccacagatatccttatgcgttgacgaactacattaaatacaacttcaaatcagtagatgaacagaaaaaagcacttttgaataaccaagactttagattggcgatttcgttagcgattaatcgtaagacgttgaataaccggctattcggttcgaagaaaaacgatattactggtttcgtgccagtgggcttagccgattcccctaagaaggtggactttgctaaatcacaagccgtgccagataccgtggattacaatcaaaaattagcgcttaaacattggcatgaagcactgaaagcgactggtcaaaagaaagttgccctcaccttaacgcttaattccgatgatgccaacgcatcatatgttggtcaatatctcaaaggtcaacttgaaaaagtcttaccaggcttcaagttgacattaaagaccgtgccaagccaagtttcagcgagtcgtgataaaaaaggcgactatgatttattactcgcaggttggggggcagatttcaaagacccaatttcgttcttagaaatcatgttaccaggggctgcaagtaataccggtggcttcgacaatccagaatacaaagctgcccttgaccgcgcaatgaatgccgatgcgaacgatcctgacaaacgttgggcggacctcgtgacggctgcacaagtcatgaataaagtccaagggattacaccactctatcaaaatgatacggcatacttgaagaatccaaaggtcaaaggcgttgtgcataacacagctggcgcacaatggagctacaagacggcttatattaaatagcgtgtgaataatcagccagttatagcctaaggattaacaagaaaggcgccagtccaaaatctattttttggctggcgccttttttgtataaacaaatcattatggttctgaattttgctgtgctaaagtaagggtattcaataaaagaaagagggaccttaaatggcaaaacaatatgaaacaacgatgattaatgaagggggccgcaatggcttcgtttattcacccgatcaagcaaagaaatatgtaatcaagtcaccagggacagacccatcagggaagagtacaaatccagagcaactctttgcagccggctatagttcttgctttaacagtgccttagatgttgtccttaaccaagaacatattaaaggcgaacccacgattaaggcgaccgtttccctttatagtgatggccctgccaattattatattggtgttgatcttttcggtcacatcgaaggtttatcagaagaagaaacaatgaagtatctcaaaaaagcagacgaaatttgcccatactcaaaggcaactcgtggcaatattgacgtcacgattaatgtgatgtaaatcattaaaaaaaggaatcagcgactgctgattccttttttggtggttaagctttcgatgaatgtggtttgccttcttgtttgaggacggattgcatggctgggtcttgtcgcatgtgttgatcaaaacggtccagattagggaagtcagtcaatgaaaatgcgagtcgtcgacaccaattggtcatgacgaatagataagcatcaggagcactgaattgattagcaactaagaaggactggcccgctaacgctttttcaatataagcgatccgtgggaaaacccgtgaacggactaaatcttggctttcgggtgtattggggagccaattgcctttacgaaatggtgagatgaagttcttatgcaattcggtggcgatgtaattcaaccacatgcgttgttgccagtactgttcagtggcatagttcgccattaatggcagcgaactttggtgactaatgtattccaaaataacggcgcattcagtcatgaaatcgcccgattcagtttgcaaggctgggatgtaattcttcggattgagttgatgatagtcaccaagtgatgtggtatggggatctaagttaactggcgtaacggtgatgaattgcaatgatggtggattataatggaattgacgaaagatactgtaattgcttctttgaaagcgttataataacgttgattaaagattggggggatcagtgatgagtacgaaagactattttaaattttttacgagcaccactttgacgggcgataacaatcgtgcgtatttggtgacagtgacgcgggcaatcgattctgagcaattgaaaagcgtgctggggaatactgtgacttattttaatcagtacggtgacggctttccgtttacttcgccgtttacgattgaccagttgaatccaatcgtcactgaacaaactgatttacaaccgactgaatttacgattattaaccatgggattggcaatattcttgcctaaaaaagggattgagacaaacgttgtgtttgtctcaatcccttttctgatggtcaaatctaatcgtctaagcgtgctcgggaaatcccagacttccgtcacactcttttaatttctagcatatttatgttcatcggcatagctgaaaaaatcggctttggcagtataatcaccgcgataaacgccgttccaaccagcacgttggccaaacgcgcctaaatcaatcaataggtgttcttcatccttggtgagatgaatcttgccaaagccaacactatagatgtaattggccaggcgattgacgagtgcctcgggattcttaaccgtatcaattttgaggtagacctgtagtaaaacatcggtaatatctaacaatgcatttgatttatccggatgcgccattagactgttgtaaagtgtatggatgttttcttttgcaattgattgacttatcatttaaacccctccaaataacaataattcacactagttatagttcctttttagttatttgtcaatgatgtagataagcgttatgattgtctcaacagttgattaagagtaagggacgattgaatatgaaatggtatgcagatggacaggaacgtgggcatcaagcaattacaatgattaaggcattattaaacgacttgaaacaagatgaccaagcggcaccattacaatcagttttgcatagttatcaaactgaaattgaagcacaaacgacagcagtaccattaattttgagccgaatgaacatcgcaattgcgaatgtgattcaaaaagaaggcttggatctatcagccagtcaacaagctaagttaaaagaaatgacggcattatcgatgattagatatggttattagtttagtaggggatccagaaagaaattgttgaagatcggaacgttatgccaccggattagcttttttatagttttattgatattaatgatgttcgtccatatggaagcccttttcgggttgagtacaaattatatgacgacgcatgaaccagcattgattgctgttaattttggggtgtggctaataatagtctttttgtttactagaatttatatgagacaaccaaaacctgactggcaaaatgtgtaaagagagccgatgctaaagaaagttgtacttattttagtgatgtttggtattgtgctagtgattgatcggatcgataaacgttggaacccattagcgctgccggagaatcaagtctatattaatgagctaatgaaggctgttccgattttgacgacactcagcaatgatttgtttgcaccaacactagaagaattattatttctggtattttctttaatctctttttagtatgctcttttcttagatattattaatgtcaaatgagatgaattacccattaaaaaacgaatgagcatggctaaaaaaggcgaagcactaatcgatgacgtcaatttgaagcaagtggcaacattgttagaccgtaattatagtagcttatacaatacgtatgtcagtattgttggggatctgcaggcaatattagggacggaggaagatgatgttaagcgactcttcgcaattccaagtgatgtctatcatttatatttagtacaacattctgacatctatgatttcgtacagattctattgcggggcggggatatatcgtttaaaaccttcttagcagagcatgatagtagtaaagcaactgtattacgtcatttgaagcaagtccgcgatctaacccgcgccttcaacttacgggtttcatacgaaccaatccggttggaaggtgatgagaagacaattcgattggtcttatccgccttatactggttggcgtctggtgggcatcaatggctatttgaagaaatcaatcacgaatgtgttttgtcggcctttgactatgtctgtgatgaatttcaattgcaaaagcctaacctattaacgcacgaaattggcgccacgattctggcagtaacttattatcgagtgatggccggtgcagtcgtgcagcccgatgaaaaattagcaactattcggtatccctaacctaatttaatcagtgatttacttgcagccgatttcactaaagaatcaacgggattacgaacttgtttggcagagttaacgttaacggaagggcgttcagaagccgctggactattcttcttgttacggtattgtccagtaccgttacgctcaataacaagtactaaggtgactgctgattgggcagatgaacgttatataccagaaattcatcgttttgtgactgcctttttggagcgtattccatttgatattatgcatgagttagagatttcgcagcacacatatgatattttcaaaaatgcgttgttaacgactacggtgacgacctatatccttgggatggacgcgacctctgtcgtttttaatgaattagtcattcgtatgccgcagctaaaacccaatgaactactccataaaaaaattagtgataccgtagattacctcttattcgaaccagcttttagttttttagcaagtgggcgggagaatttgataaaggcttactataatttaattcaacaagtcatccagcagtatcattctgtaagccaggtgaaggtcgcactcgtgattgagcaagattacattgactatatggatatcttaacagcactcgataatatcaaatatgtcgctgttagtacgaccgatgaagctttacgggatgcagacctgattgttcggacgtcgagcattgccttacccgaaaacgttaatccggaggcgttgtattttacgtggcgcttaaatgctagtagcgatcactatgcccggctgtatggcattattcatgaattatggatgcaaaaaggtacccaagcataataaaaaagccgttcgacaatttgtcgaacggctttttttgtgcaattaggcacccatatttgcttcttgttctgcgtttaaggctttcacccgttcgtcaatcatttcgatgactttttgacgatcagcttcgttttcaacgaagtctaatttgtcaccatcgatttgcatcttgggactttcgtcataggcttcataccaagcatcataacggctgtttaattctttataatagtcgtagagggttggatcggcttctagttgttcgtatgaacgaccacgtttttgaatccgtgaaagcattgtttcgaaactaacgcgtacatggattaataagtcagggcgtttcttgtgggcagcaaatggcaattcttgcatcatgttagctaataattcgtcgtagacacggacttcggttgcggtagcgcgaccaagatcagcgttcaagtggaagagtaatgaatcttcgaaaattgaacggtctaagatgttgttatcatctgtatatgcttgtttgatactatcaaatcgtttgtttaagaaatagatttgtagtaagaatgcatatttagttggatctttgtagaataatggtaatacttcattatcgtctactgattcgtaaaaggcttcagtgcctaagtgatcagatagatatttagttaaactagtttttcctgcaccaattgtgccagcaagtacgagcaatgtcatcagtctccctcttttgaccataaaatgtgtttaaattattattgatatacaacatatggtgttttacaaccaaacgtcacttaaatattctagcatttctgacgtaaaaagcaatctttgattttaaacaacgcaatagttactatttgcacaatttatggtaggattaattactaattataaggatttttactagggggaatcggtttgaacgcaagtgagagtatttttctaacgcaagcggaaaatgataagtacgccttattaatggagattgttggtttaaaacgggatgagttgcctgttaaaaagcggattgaactatcgcgtaataatcagccgctcgttgaagatgtgaatctaaaacaagtagcaatgctattaaatcgcagttacggtagcttgtacaatatgtacatgagcattatttggggacctaaaggaaattaccggaccggatgttgatgatattaaaaccttgttcagcgttccaacagatgcctatcactatttattagtgaataagtcagaagcgtttgattttatcaaaatcttactcaagggtgagaccgttacattccaagaattctgggaagcccatgatacgagtaaggcaactgcgctacgccatttaaaaggggtgcgcgacttaattcgctcatttgatatccgtatgtattatgatccacttcggttaaaaggcgacgaaaataaaattcgtttagtcttaacgatgttattctggatggcaacggaagggcatacctggccctttgaagatgttaaacgagacgatgcacttaaggcgttcgatgttgcgattgatcggttccaattggaaaaaccaatattttgacccgtgaactaggggcgtattcaatcgtcataacctatttccgattactacaaggtcacacggtttcaactgaactagatggcgattttatccgttatccagttcccaatatggtttctgaatatctaaaacagccctttgaagaccaagctttacggatcaagagcattcttgcacaaatgacccaagaagaagcgatggctgaatcattcaatatatatgacatcattaattttggaccgattcagattcaggatgctaatccctacatggaatcttacgaaacgcgatacaagcggtatattccagtgatttacgagtttgtagaagcttttattgatcaaattccatttgacatcaagaaatacctaaacttagacgatgcgaattatcaaggtttcgtgcaaacgatgatttcgatgacgatgaccacttacatgtttaaacaagatgtgacatcggtgctcgctgaccaaatgatggaaagtgttgaatatctcaagccaaatgatgtcctaaaacaaaatattgatgatacggtggattacttattaatcaatccgaaagtgtcattcttagtcaaattacgtgaagaattggtcagtggttactacaacgtcttgcgtcagatgattcaacggtttgcaccgatgaataaagtgaaggttgtcgttgtgacggaacaatccttcctcgggtactttgatttgatgactgcactgaatagtgttttgtatgtggatgttagtcaatctgacgcggatttaatggatgctgatatggtggttacgacttcgatcattgatttaactggcatcgttaacccagaagcggtgatgtttaaatggcatcaaaatgcagatagcgatcattttggacgtatgctcggtttattacggggtctatggattcaaaaatcatctattgatgattgaatttaaagattaaatgcggtattcttacattaagaagtaaacacgtgaataagcgcctatatggattgacagagagataccggttggtggaaggtattgaatccagcattccagcgcaatagtgggtagtgatgaactacacggttcctggccgttatcagtaattgagggcacctattatttgtagtgggtgaacttgggtggtaccgcgaattgaagtcttttcgtcccaattaagggatgagaaggctttttttattgttgttaattaaagatcattaaaaggagagagtgcaatgttagatattaaagtcattcgagaaaatgtccaatgggcaaaggataagttagctagccgcggtgttcaagctgcagaaattgatgaggtcatcgcattagatgaaaaacgccgtgccttaattgtgaagaccgaagaattgaagaaaaatcgcaatgctgcctcagaagccatcgccgttgccaaacgcaataaagaagatgcgactgaacaaatcgctgctatgaagaatgttggggccgaaatcaaggctttggatagcgaattggctgaagtgaaggccaaagtggactacatcttagtccgcttacccaacttcccagatgattcagcacccgttggcccagatgaaagttttagccgtgaagaacgcaaatggtcaacaccccgtgaatttgattttgaaccattagcacactgggatatcggtgaaaaattaggcatcttagactttgaacgcgccgctaaagtatcaggtagtcgctttgtttactataagggtgccggtgcacgtcttgaacgggccgtttataacttcatgttggatcaacatgctaaagaaggctatgaagaaatgatcacgccgtacttagtgaatggcgaatcaatgtttgggactggccaatttcctaagtttacggaagatgtttacacaatgactaacgaaggcgaacccatgactttgattccaaccgccgaagtgccattgacgaacttctaccgcgacgaaatcttggatggcgcacaattgccaatctacttcactgccttatcaccagctttccgttcagaagcaggaagtgctggccgtgatacccgtggtttaatccggatgcaccaatttaacaaagttgaaatggtgaaattcacgaaaccagaagaatcattcaatgaactagaaaaaatgaccgccgatgctgaaaatatcttaaaagcattgaacttgccatatcacgtcatcacattggcaactggcgatgccagcttcacatcagctaagacatacgatatcgaagtttggttaccagctcaaaatacgtaccgtgaaatctcaagttgttcagattgtacagacttccaagcacgccgcgcccaaattcgttaccgtgacgaagatggccacgtcaacttggtccacacattgaacggttcaggcttagcagtcggccggacagttgccgccatcttggaaaactatcaaaacgaagacggcagcgtcacaatcccagaagcattggtaccatacatgggcggcatgacaaaaattggatagagtgtgaaatcaaccgggtatatcctggggattagcacggaatggcgaataattacgtcagtaattgtttgacgttcagagctaaccgcaaggatatggttggtagaacacgtttaatatattcacaaaaaaacgtctaacaatcggtttattgttaggcgttttttaattaaatttagttaatctttaccgctttaagggttcaaacccttataatggggactattagttaaggaggaatacaatgcaaattgaaattaacaatcttgtcgtaacgtataaaaataatgttgcactggatttaaaaaacttaaccattccaaatggcggtgcttacggcattgttggtcataacggcgctggtaaaacgacgttatttaagagcttaaccaatatcattacaaattattcgggtgaaattcaaattgatggtcaaaacgtccgtgataatccggctattttaaatcgggttgggattgttttagacggcatgtctgtttacatgaatcaaaccggctggtttaacttggcctattttagtggcttacggggtgaatttaaccgcgaacaagcacgcacattagcggccgaaattggcattgaagctgtcttaaatcaaaaagttaaaacttattcttacgggatgaagaagaaattaatcttattaatcgcgttattgcaccaaccggaactacttatcttagatgaaccttttagaggtctagacttagacacggtacaatggttcaagacttacctccaaaaattgattagcgaaggatcaatgaccttgctcatctcaagtcacgttcaaagtgatattgaaatgttctgtcagtcagtatttgtgattgatcacggtcaattgcgtgaaacgattgatttagcgaccgaaagtgacaagaagttaagggttgtcgacacgactgataatgtaaaagttcaagcgattttaaccgaaatggcttatgaacatgaagtgttagccgatggtcggattcaattatcgattaaagatcctaagtggcgagaagtccaaatgaaattaattgatgctgagatcgaaatcaatgaaattggcgtactaagtgcattggacaataaattaaattaaggaagtgattagatgacgatccaacgaattgtaaaaatggaattcttcaaatttttccatgaaaaagtatatatgttagtttttgggattattgcggtgctcaatattatttttgccttggtattggcaaacgcacaatcactaccagctgagttatatggcaataaaacctttggctcatttatgattattagtatcatgttgttgatagccgccaatttcatcttattatattggtatccgttccatgttttatcgatcgattataataatgatgttttggccttgatgatggcttctgggattaaacggaaacatttattctacgccaaattaattgtaacgatttgcttatcaatgttagccgcagttgtcctcttattaataccaggaatattgctagtcattgaattgaataagaatatcgggatgctgcaattggttttctcatcgttcatggataatttctcttggtattatttagttgatcttattctagcctatatcacaactgtgacattaatgttgttggcttgtacttggatgcgaggggctaaaaaagcaatcttggttttcatcggtctcacgtgggtttatcggattgtaacatcactcacattgattgtgattccaacgattgatatgaacgaaatgggtcattatttagcgatttatggtgttcaaattatcgcgatggtgctctttggttacatcacacagagaattatggctaagcaaaatttataagacgagtacagcattaatgtatattataggaagtaattagtatgctaaagcgttacggggatgtcccgtaacgctttttttgtgaccattgtttgacggattgatgtgtaagggttgaaattttcatgaaaaaaggttaaactaattcagttatcgtggatattaaatgtaattgattatacatcaaaattaagtaaggagttttacagatgaagatgattcaaaatgaatttaagttcattgccaagaataaaatcatcatgatttcgttaatcgcaatcgtgtttattccgttcttgtacagtgtctttttcctgaaatctgtctgggatccttacggtagcactggtgaactaccagtcgctgtcgtaaataacgatcaaccagcaacttacaacggtgaaacgttgagtgctggtaaggatatggttaaggaattaaagaaaaacgaccaactaggttggcgtttcgtttcagccaagaaggctaagcaaggtttgaaggataaggaatactatacagtcgttactttacctaagaacttttcagcaaacgccgcaacagtcttggataagaatcctaaaaagatgcaaatccaatatgaaacaaacgattcattgaacttcatcggggaagttatcagtgaaatgggtgccaaggaattgaacgcccaagtacgtgaaacagtgacaaaggcttatgctcaagtcatgttcaaacaagttaaaacagctggtaaaggcttcagcacagccgcttcaggggctaagaagttaacgaagggttcagtcacactttcagatggcttgaacacttatacagctggtgttgataaggtcaacgatggtgtcatgacaatgaagaccagcgtgacacctttatcagacggtattcaaaaattagcagccggttcaggggccttaaacacaggcttacaaacattgaatagcaaaacaggcgcattagcctcaggtgctagccaattggacagcggtgccaaccaattgaacacaggtctacaaacattgaacagtaagacaggcgcattagcttcaggcgcaagccaattgaacaacggtgccggtcaattaaacacaggtttacaaacgttaaatagtaaaacaggtgcgttggcttcaggtgctaaagatttaaatgacggtgctggtcaattaaacacaggtttacaaacgttaaatgatggtaccggacaattagccggtggcgttacaaaattaaagagtggattaaatgccttagatagtaatagtgatcagttagttgctggtgctggtaaagtaaatggcggcgttgatcagttaatcgatggtagtcaacaattaagtggcgccttatctgctgctgctaatatgattgatgatcagttagatagtaaatcagaaaagttagatttattgagatcaagcatgggcgaattacagactggtgttgagaaacttaacgcggggataaatagtccacaagcagatgcaatttcaaaacaagtaacaacagacttaacggcagtagcaactgatgctacaagtacaggacaatcattacaacaaattaatagtaaactatatgataaaaatgtaagtacaagtgcagctagtcaagttgctaacactggtgcgcaattacaagctattacagaagtagtttctgatccacaaattaaagcagcattatcaaaagatccagctttagcacagaaactaaataatgcacttcaaagtgcggggactagtgttactgctacagctaatcaacttgcctcatctggtgcagatttaaatacgattaaaactaatactgaagatactggtgtacatctaaaatcagttcaaacgcagatgactaacttaatgacaagtcttcaagcattgaaaaaaggtgtaaatgaattatatgttgcagcacctcaacttaaatcgggcgtagatcaagcaattgatgaattaacaggtggtttaaaaactgttagcgcaggtttaactaaaactagtgataaaccttcagatatgggggctatccaagcaacagatactatcaatgcaggcttaagacaaattaaattaggccttgttgggactccgagtcaactaggcttaattccaggattaagcgcctatacagctggcgtatcaaaagcaagtgatgggacaaacgagttaaatagtaaggtaccagcgttgacaagcggtgttggacaattagcaacaggttcaaaagccttgtatgctggtacaacacaactaaacggtcaagtgccacaattgacaagcggtgttggacaattagcaacaggttcaaaagccttgtatgctggtacaacgcaattaaacggtcaagtaccacaattgacaagcggtgttggtcaattagctgctggttcaaaacaattagcaactggtactggtcaattgaatagccaagtaccacaattaacaagtggtgttagtcaattggcaacaggttctgaaacattgaacggtggtcttggtcaattaaacgctaagatcccaacgttaacgagtggtgttggtcaattagccgatggtacaagtcaattagctgctaactcagctaagttaaacgacggtgctggtcagttaactgatggtaacaagacattagcaactgcccttaagggtggcgcaaaacaagttaacgatatccaattaacgaataagacagcggatatgttcgctgcacctgctgaattgaaacattcaaactatagctatgtgcctaactacggtcatgctttagcaccttacgttctttcattagcattgttcgttggcgcaattgtcttcaactttgcttatccaattcggaagatctcaatgactggtcaatcatcaacagcatggttcttaagtaaaatcacggttggcgctttagtcgctgtcgggatggcaattatcgaacctgccttaatgatggttgctggattaaacgtcgatcatccagcacaattcttcctaatggcaattaccttctcacttgcttcgatgtcgatcattatgttcttatcaatgacatttgataatcctggtcgtttcttagcaatggtcctcttgatgcttcaattaggggggtcaggtggtacattcccaatggaaatcacgaaccacttctacaacgtcattcacccattcttaccaatgacgtattcaattctagggctcagagaagcaattacatctggtttaggtaccggtcaaattgttcaatcattctttgttctcttagccttcatcgtcgtagcactcttgctattatggttaggaatgaatcatttacaaaaaatcggcaacggtggtcgctcacaattagacgacaaccaaaaattacaagatgtcgaaaaataatcactagaaaaagcctgtcagctaaatgctggcaggctttttttagtgcaattaagtattcttaacgtctaagaatgtataaccgcggcgatcataacggttgcgacttcttgagtattcaatcggttggccattatcgagataaacaacttgttcaacttctaagacgggatcagttggggcgcagtccagatattgctggtcatattcatcggccttatcggcttgaatattgcgaaaggcacccgcgaacgtgaggtgtagggtctccttaaggtaggtgtagattgactgtgcgagaacatcatcagttaatccgggaactagactcactggcatgtaggtatgttcgaggacgctattaacgccgtcgataatccgtagtcgaatgattttgtagacgggctgttgatcagcaagcattaagcgctctttaatctcaggcgttgggaaagtcacctcaaacgtgatgatcttacttgagagtgttttaccaatgtcggctaagtcacgtgacatcccacggtattgatccgccggtgccgttgatttattccaaaaagagtggtctaacacctttgtaccagcgccgcgtcgtgatagaacgagtccttccatcgttaaaatcgtgattgcttttttgatcgtcattcgactggcatcgaattcttgaactaagtcggtttgattgggtaacaacgtattagcaggatagcgcccttgtttaatccgttgtcgaataatgttggcaatttcttcgtattttggcaaaaaaaataccccgctttctacttatagtttagtggaaacaacggggtaaaacaatctttagtttgcgagaggatctttttggcgatctagcattttaatgaatgggaaccagatgagaccgactagcacaacgtcaatgagttgtaagatcccgccgagtactgagttggttgcgagcatcccactgaagaagattgggacggtccatgggactgaaaccccagttggcgcaggcaccaatccgattgccattacagtgtagttgagcgctgtgacaatcagtggtgcaatcagccatggaatgaaaattgtggcgtttaaaacgattgggaacccgaaaatgacaggttcgttaacgttgaagacagcgggtgccaaggccaaacgtccgacatcgcggtattgttttttcttcatgataaaggccatcagtaagacgacggctaatgtcatcccagaaccaccgagacctacggtgaaagtttccatgaatggtttcgtgacaatatgtggtaaagcatggccagctttgtaagcttccaagttttcgagcattaatgtgttccagatcggatccattacagagttgacgataatttgcccgtgaagaccgaagaaccagagcaattggacaaagaacaatgcgattagggttgcaggaagactgccacctaaaccaacgagtggtttttgaataatttcatagatcacgtcgtgcaagttaacatggaataaaccagtgactgccgcttgaatgactaagaaaatggttaaggttaaaatagctggaattaaagcggcgaatgatttcgcaactgcaggtgggacaccgtctggcatcttaatttgccagccttttttagtaatccggcaataaatttctgcagcgataaatgccgcaatcatcccaatgaacatccctttagcgccaagtcgatcgagacttaaaacaccgctaacgtcaacgcctttatcggtggtcatcatgaatggggtgaggattaggaaactggcgaatgaaacagcaccgccgaaaattccgtccacatcatatgaattagaaagataataaccaatcccgaatgtgacgaagaccgtcatgattgacattgtggcattttgtccattaccaaggagttccgttagggtcgctttggtggcatcgttgaaaaatggcaggttagtgataacgacgatgattgatccaaacatcgtcaatgggaatgaaagcataaatgcgtctcgtagaacagttaggtaacgattttggcctaacttatttgcgaaaggcatgattttcttgctaagcgtgtccataaaagtattcacgtagagcaccgtcctttacatgtgtttgcaatcgattacattctcaatatagcacgctctttttgaaaagtctagacatttaaataaaagagttggttttttaaaaagaagctgatatactgaggctattcaaacaagaaggagtgctagcgatgactttttatgactttccaaaggatttttggtggggttcagcagcaagtggtccccaaacagaaggccggattgacggtgatggtaagggcgataatatttgggattattggtatcaacaagcgccagaaaagttttttaaccaagtaggcccagcgcggacctctgatgtgtatcaacaattcaaaagtgatatccaattgatgaaacaaacagggcacaatagttttcggacatcgattcaatggagtcggttgtttccacaaggtacgggggagattaatcaacaagctgtcgatttttataatgcgtacatcgacgaattaatcgcaaacggcatcgaaccgtttatgaatttataccattttgatatgccgctagcactccagaaaaaaggtggttggctcaatcgtgagacggttgatgcttacattcattatgctgaaacctgttttgaattattcggggatcgggtgaagaaatggttcacacacaatgaaccgattgtgccggttgaaggcggctatttatatcagttccattatccagctgaaattaatttagcgcatgcggtacaagttggttatcacgaaacattagcgagtgcgatggcgattcaaaaatatcacgcacgcaatcaaggggggcaaattggcattatccttaacttaaccccaagttatccccgggatgcgactaatccggcagatgtgaaagccgcacaaattgcagatgcttttttcaaccgttcattcttagatcctgccgtgaagggggaattccccgctgatttggtcgcgattttaaaagatctagccatcttacccgactatcaaccagctgacttggcattgattaaggcgaacactgtggatttattggggattaattattatcaaccacggcgcgtgaaggccaaggaaaccccaatcgaccatacaaacggcccgatgccggatgattttttcgacaattacgatatgccgggtaagaaagtcaatccgtatcgcgggtgggaaatctacgaacgtgggatttacgatattttgaagaacgtccgcgaaaattacggcaacattgcttgctttatttcggaaaacgggatgggcgttgaaggcgaagaacgttatcgcaatgcggatggccagattaatgatgactaccggattgaatttgtacaggatcatttgaagtatgtccatcaagcccttcaagaaggcagcaactgtctcggttatcatatgtggacgtgtatggataactggtcatggaccaacgcctataagaaccgctacggttttattgcggtggacttagaccatgattgccaacggacgattaaaaaatcaggtcattggttcaagcaagtcgctgatcaaaatgggtttgaagcctaatcgaattgaaaaagcacaatcgacgaaacaatcgttgattgtgcttttttgtctgttatattcgggtaaacttgataaccatcaagttcttaaaatcggctttcttctatactaaagacaatcgttaggaagaagggattttaaatgaaatttcaaagatggttacaatccgtgaagaatcagattgcgctgactgttggcggattgattgcagtggcctatggctggtattggcttggtggggcggtaattgtgatgcaagggctgttattggttgcgtcaatgatgggggttgcaccgattttgatgcaggcgtatcaagcgctaaaagtgaaagtcatcagcattgatttgctggtcacgattgcggtattgggagcgctaatcattggtgagttcaatgaatcggcgattgtcacgttcctctttttattcgggagctatcttgaacaacgaaccttgaaaaagacacgagaatcaattcgcgcattgtctgaaatggcgccacaaacggcacaagtgttagcggccgatggcactactacgacggtagatgttgatgatgtcgaaatcgatgatcaagtattggttaaagctggcgctcaggtgccggttgatgggcaagtcgtccaaggtagtgcctatgtcaatgaagctagcatcactggcgaagcacaactcgttaagaaaatagtgggtgatgctgtttattccggggcaattgtggataacgggacattgacggttaccgcaacgcaggttggggatgatacaacttttgcccaaattattgaattggttgaagaggcccaagatagtaagtcacccgcggaaaaattcattgatcgttttgcgacctattacacaccggccgttttagtgttggcattagcgattggcttaatcacgcgcgactttaaactcgcgattacgattctggtgcttggttgtccaggtgcgctagtaattggtgcgccagtttcaatcgtggcggggattggcaatggcgcgaagcatggggttttgattaaaggcggcgaagtcgttaatgcgatggctggcattgatacgatggtctttgataaaactggaacattgactaaaggggacacggcagttgcacatgtgcaattttatacagcggcagaacaagcaacgttggcagtgactaccgcggttgaagcacagtcagatcatccactggcgactgcgattgtgcagtatgcacgggaacgaggggtgacagacttaccaactattgaacgaattgaaacgctcaaagggttgggggtacaagctgaagtcgctggtcaaacaattcggattgggcgggccaagatgatgactgaagcagggatccggttaaccggtgcgcagattgcggcgatcacggccagtcaaacagcagggcaatcaaccgtgttagtcgcagttgaccaacaagttgttttattaattgggattgctgatacggttaaaccggaagccaaggcagcattaacgcgtttgaaaaaagcaggcgttaaacatttagtcatgttgacgggcgataatgaccagacggccgcagcaattgccaaagccgtcgggattactgaataccacgcgaatcttttgccggcagagaaggttgaattcattaagacctaccaagcaaacggtcaaaaagtggcttttatcggggatgggattaatgacagtccttcgctcgcactggctgacattggaattgcgatgggttctgggacagatgtcgcgattgagacatccgatattgtgttaatgcaatcgacgttatccgaattagtgtatgccgattacctcacgaaggcgacggcacgtaatacagttcaaaatattgtgattgctgttggaacggtcggattgttattgcttggcctgatgcttggctgggtacagatggctagtgggatgtttgttcatgagattagtattctggtcgtgatattcaatgcgatgcgcctgattcggtttaaagttcgctaaacttgatggcggtcaatttttaatcatgcagcgcgcggtatagtaacagtaatcaaacgaaaaggtggtcattgaaatggcaaaattggtgatgcaattagacgagctatcatgtccgtcatgtatgcaaaagattcaagcgggtgtcagtcaacaagatggggttgaatcagtgaaagttctctttaatgctagtaaagtgaaagcagaatatgatgaagccgtgacaaacccagatgaattaacacaagctgtaactgacttgggctacagcgttcaaagtatcaaagtgaaatagggggcaattaatatgttatctaatgaagaaatcgaaacacgttaccaagcagaagttaaacaagctgatgttgatcaccatacaccaaccgcgggtgccatgatcggccatgtgatggctaacttaacgattcaacggcgtaaactccgtcaaatgaagtggtacgctaaaggaatcaataaccaagcttttaaagcgcaattaaccacattgcttgcagaaaatgatatgctattagacaagacggccgaacggctactagacgaaggtgaagtgcttccgacgacgcaagctgagtataccgagtatgggatgctgacagaagagccgcggattaagtactgggagatgccagcgatgattgcggaaatggttgcggactataatactgctaatctatttgtttcccgtgcgattaaacttgcggaaaaagaagaacgatttgctttagcggcggatatggtttctttaatgggctacaaccaacaccaaatccgtgaattgcaaagccaactaggaaaagcagcgcgcgaaggattagatgaagaagacgacgattaagatagagggaagtgggctaggtgactgacgaacaacatatttgtgctgagatagtaccgatttttaatcatttagaccgtgatagtttggtcaagatttcggcagttacccatcatgaacgcgttaaaaaagggacgttggtgatgagcccgatggatcagaagcggttagtgatcttagctaaggggagcattaaggtctatcagctctctacagcaggcaaagagcaactgctacgcatgatggaacccggtgattttgaaggagaaaagttactttttaaaacggaagatgagccgttgtacggtgaggtcttgcaagatagtacaatctgtacgttatcgcggagtgcttttcaacagttactgttagcctatcccgaaattagtttaaagttactagaagcaactactgataagatgacgcgtttggaaaaacaggcgaacttaatcaatatcgagtcagttgaatccagaatcgtgacttatctacttgatttagctaaagcgagcggagaaactgaagtgatgattccgatgaagttaaaagaactggcaacatatattggaacaacgcctgaaaccttatcgcgtaagttaaaacagttagaaagtcatgcgctaattgaacgaaacggtcgaaagattgcgatattagactatgaaaacctagaagacttctattaggacgtgaagattctgcgaattttgcaggatctttttgtttacctataccaatttggataaaattggaacaaatagcagtttaaaagtattatgagggataatcaatagcgcagattagggatgagaatccgggtgatatgaattattttttcgatatttatacaggaattcaatttttttgaatttttttcaaattagtgattgacgttgtcccactaggatggtaagatattctatgtcgtcgagagatgagcatgtagcaaaacgttgaatgaatattacttaaaaaaagttgttgacattcgggtttatacatgataagatagattgtgttgcttatgagttttaacttaataagtgattaactaatatctgatgtagactttagataagaaaacgcctacattaaagttgaaaaatcaccctaaaagcaatatgatagaggatataagtgaaaatgaaggacgggtaactcatggctgatagtgtttcaattcaaaaactagtcaccgatttaaaattacaagtttatgccggtgaagcacatttaaaaaataaagcagtgacggtgagtgatatttcccgtccaggactcgaattaacgggctactttaattactacccttacgagcgggtgcaattatttggacggacggaagtttcatttacgcaaaatatgacaccagaagaacggttaatgattatgcgtcggatggcttctgaagatacgccctgtttcttggtctcgcgccaattagaaccgccaatggaaatgcttaaagcagctgaagaagcggggattcccgtgttggggtcgaatttatcgacaacgcgtttgtcgagtttagtaaccgattatttggaagggaagctagctgaacggcgctcaatgcatggtgtgttagtcgatatttacggtttaggtgttttaattactggcgattcaggtgttgggaagagcgaaacggcattggaattagtcaaacggggtcatcggttgattgctgatgatcgggtcgacgtttatcaacaagatgaacaaaccgtggtcggtgaagcacctgcaattttgcgtcacttacttgaaattcggggcatcgggattattgatgtgatgaacctctttggcgctggtgcggtgcgggctgaaacgtcaatttcgttaattgtccacttgcaaaattggtcacaagataagaaatacgatcgcttaggttcagataccgaagaacaaatgattttcgacgtccctgtaccgaagattaccgtgcccgttaaagtcgggcggaacttggccatcattattgaagtggcggcaatgaacttccgggctaaatcaatgggctatgatgcaacgaagaccttcgaagccaatctaggcaagttaattgaagccaattcagatgaagaagaatagttaaaagtcagaaaagttcgttaaatatggtaggtctaatgactagtttgagctatactgttagaaagttagcttgaaaagtacgttttgatgaaagcacatttacaaaaggagcgaataatttgaatctactattaggcgcattaaatccgattgcattacgattgggcgcattggagatccactggtatggtgtgattatcgcaactggggtcgttttagccgttggattggcattacaggaagctaaacggcgcaatgtcagtgaagatgatattttaaatttaattttatgggcattaccatttgccttaattggggcccgactgtattacgtcgtttttgaatggtcgtattaccaagccaatcccggcgaaattattcagatttggcacggcgggatcgcgatttacggtggactgattgcagctgccattgtgttcattatctattgtcggcgtcatgcactatcgccttggttagtgttggatattgcggcaccaaccgtgatgatcgcacaagcaatcggacgttggggcaactttatgaaccaagaagcctatggggcgccaacaacattgcactttctccaatcgttacacttacctgattgggtgatccaacagatgttaattgatggtgcgtatcgtcagccgacattcttatatgaatcagcatggaatgtattagggtttattatcatcatgagcattcgccatcgaactggttggtttaaacaaggcgaaatcttatttagctatttaatttggtattcgtttggccggttcttcattgaaggcatgcggactgatagtttattcatcggtccattgcgggtatcgcagattgtctcactcgtcttattctttggtgcaattggtctttggatttggcggcgtaagcacagtcagttaccggattatttaaccggcaatcaagcaaaagaacagaaatagggatttgtttaaaaggagaattatcagatgacagtaaaaattgcagttttaggggccggttcatgggggaccatcttagcaaacttattagtggaaaatggccaccaagttgagttgtggggcaatgatcctaaaaaagtcgctgaaataaatgaacagcataccaatacacattatttaccagattttaaaattgatccccagttacacgcaacgattgatcttaacgttgcacttgaccaagttgacgttgtcttgtttgtaattccaacacaagcgattcgtgcggtggcggaacagattgttcctgtgatgattgcgaaaaaagtgaaacccgtgattgtgacggcttcaaaagggcttgaacaaggcacgcacaaacggatttcagaagtcttgacagaagccattccagaaaccaaccgcaatgggattgttgttttatcgggtcctagtcatgctgaagatgtcgcacaaaaagatattactaccttaactgccgcatcaagtgacttgattcaagcccaatggatccaagagattttcatgaatgattatttccgcttatataccaaccctgatgtggttggtgttgagatgggagctgctttgaaaaacgtcattgcacttggcgcgggcgctttaaacgggcttggttatggagataatacgaaggccgccttgatgacgcgtggcttagctgaaatttcccgcttaggcgttgccatgggggctaacccattaacctttatcggattatccggtgttggggatttaatcgtgactgggaccagtgttcactcgagaaactggcgtgcgggaaatgcacttggtaaaggtcaaaaattagctgatgtgctagccaatatggggatggtcgtcgaaggggtcgcaacatgtaaagcagcctatgaattggctcaacaacgttctgttgatatgccaatcacacgggccatctataatgtattgtatgaagattgtgatattaagactgaaattgcgtatttaatgcggcgttcaggtaaacctgaaatcgattttgatgaagtctaaaactttttaacgaataaagcggcatcattttgaatgggtatcgcacccatcatcagagtgtgttatgatgattagcgttgagaaaaaggctaaaggagaaccgattactttatgggcgatttggtatctgtaagaccaacttgtgagttttattttgacagagggatgcaggcgtttgaacgatttcagtacacgcgcgcattaacgtgtttacaacgggcaaagtcgctggctaagaccaaagatgattacatctttgtggtgtgccaattagcgatttgtttggaatcggttggcgactatcatggtgcggcgaccgttctggaagaaattccaaccgccaactatcagagtcatcctgagttacaatattttttagcaacagcgtatgcctttttaaatcagacgcaggcgagctacgaactcgcgactgcttatttacaaagtgacgattcggattttgatgccgaagccactgaattactacaggaattaaaactaacaagtccatcaaactggtaaaacagtttggtagacttttttttacataacgggtaagatacgttttaagaagaacgagtacttttcaaaagtaaggagataacagacatggctaaaagttatgatgtaattgtgattggcgcaggacctggtgggatgaccgctgctttatacgcctcacgtgcgaatttatctgtattgatgttggaccgcggaatttacgggggccaaatgaataatacagcagaggtcgaaaattatcccggctttaaatcaatccttggtcctgaactaggcgaaaagatgtatgccagcgccactcaatttggtgctgaatacggctatggtacggtcaactcgattgaactgcaaggcgagatgaagattgtgcacactgacgaaggcgatttcgaagcgcgttcaatcatcattgcaacgggttcagaacacaagaagattgggatccccggtgaagatgaattcggcggtcgtggtgtctcatactgtgcggtctgtgatggtgccttctttaagaataaagaagtcgtggtcattggtgggggcgattcagcgattgaagaaggcctctacttgacgcaattagccagcaaggtgacagtcattcatcgtcgtgatgaactacgcgctcaaaagattttacaagatcgtgcatttgctaacgacaagatggacttcatctggaatgcacaagtgacaactattgaaggtgacgacaagaaggtaaccggtgtcacttacattgataaggtaactggtgaaaccaaagaagttgctgcaagtggggtcttcatctatgtagggattgaaccaatgactagtgcctttggtgatctagggattctaacggatgccggttggattaaaacggatgaccacatggcaaccagtgttccaggtatctacgcaattggtgacgttcgtgaaaaagatcttcgtcaaattacaacagcagttggcgacggcggcatagcaggccaagaagtatttaaatacttacaaagtatctagagtgcgacggcagccggttagcttccgaggattaacacagaatggcgaaggattgcggtagcaatcgtttgacattcagggttaaccagaaaagacagttcgaggaagcacgattagagtgcgttcgaaacgattttatttttgaggattaacctaaaaatgtggcttatgacgcacatttccagcggtcgactaaattttagtcggccgtttttttattttgggaaaaattttaatttttagaaggacaagcattattaaataatcgacccagtcaattagattgatgcgcattaccgtacaaccgatgctttaggaaagcggttgattatggtatacttagaactagcttttagactaaaatgcgggggttacacaatgagctggcaagataattatgcaatttggaataatcaaacagaaatggatttacctttaaaaaaagcacttaacgaaatggcaaacgaccatgatgcattagaaaaagcatttagcgttccaatggaatttgggacagctgggatgcgcggtattttaggccctgggatcaactgcatgaacatttatacggtgcgtcaagccacagaaggcctcgctcaattcatgaaaacattaccagaagcgactaaaaaacgcggtgtggctatcagttttgattcacgttatcaatctgaaacatttgcgcacgaagcagcgcgggtcttaggtcaacatcaaatcccaacgtttgtttttgatgccttacgcccaacacctgaattatcatttaccgtacggcacttacatacctatgccggtatcatgattacagcaagtcataatcctaaacaatacaatggttacaagatttatggcaaagacggcgcgcaaatgccacctaaggaatccgatttaatcacaagttatattcgcaaagtaaccgatttatttgcgattgaagtggctgatgaaagcacattgcgcgaagccggcttaatgactttaattggcgaaaatgtggatcaagcttacttagctgaagttaagcaagtcacgattaatcaagaattggtcgacacagtcggcaagaccatgtcattgatttacaccccacttcatgggaccgggaaagtacttggtgaacgcgcattgcgtcaagcaggctttgaacaatttacaatggtcgctgaacaagcagttgctgatccagaatttgcaacgacaccattccctaatccagaattcccacaaacattcgatatggcgattgagctcgggaaagcacaacaagctgacttgttgattgcgactgatccagatgctgaccgtttgggcgccgctgtgcgtcaaccagacgggagttaccaattgatgactgggaaccaaatcgcttctgttttattacgttatattttacaagctagtaaagatgctggcacattaccagccaatgcaacggctgttaagtcaatcgtgtcaacagaattggcaacgaagattgcagcgagctacaatgtgaagatgattgatgtcttaaccggcttcaaatttatcgctgaacaaattcaacactttgaagacacagacgaaaacaccttcatgtttggtttcgaagaaagctatggctacttagtgaaaccattcgttcgcgataaagatgcgattcaaacattggtcttattagcggaagttgcagcttattacaagtcaaacggtaagactttgtatgatggcattcaagaattatatgcggaatacggctacttcgctgaacaaacgactgcagttgatttcgaaggggtcaatggcccacaacaaatggctgacttgatggttaaatgtcgtgaagaaagcccagttgaatttgccggcatcaaagtcgcttcagcagaagacttccaaacacaaacagaaacttttgcggacggtcatactgaacccatcaatttaccaacatctaatgttctgaaatatcacttagaagatggcacttggattgcgattcgcccaagtgggactgaaccaaaagtgaaattctatgtggggacatccgctgatgatgccgcaacagctgatttgaagttagcaaacttcgaaaaagcaattcatgaacttgtaaaatagatagggcttctgttttacatttcaggataacttacctataataaagaacagtaaatagacggactactgcgttagtcggtctatttttgtaagaaaagggaggtagtttggtatgggtatgcatcaatatttgcaaggtttgaataatttggagacactaaatcgcgcaccaggattgtttaaatatcaagaacattccgttgcagcgcactcctttaaagtagcagaaattgcgcaattattaggcgatattgaagaagaaaatgggcaaacgattaattggcaagtgctgtacgaacgcgcactgaaccacgattatacggaacggtttatcggcgatattaagacgccggtcaaatacgcaacgcatgaattgcggacgatgttggccaatgtcgaaagttcattaaccgctaacttcattaaaaatgaaattccagatttcttacaagaacggtatcaacgtcgtttgagtgaaggaaaagatgaaactttggaagggcaattattagccgttgccgataagattgatttactctacgagtcttttggtgaaattgaaaaaggtaatcctgagaatgcttttctagaaatttttgcggaaagtttaaaaacgattatgcaataccaaaatctcgcatgcgcccgttatttcatccaagaaatcttgccagatttactgagtgaagacttcgcagatcgagggaagctaacccaattagtgagacagacgctagcggaatagagtgccgttgtcagtcgctcagattcagagcatttgcctaacttggcgaattgacgctataagcggcgatttgacaagtgtagcaaagcgcaggaatctactgacaacagcacgtttccacactttagttgaaacgtgctttcattaagcatccttttccggttagctacaccagccgcatcatcgactgcgtcgctaatccgtctggttaggctaatcctcaaaggataaccgcttaatgacgcactctttaatcagcaatctggcgaaagtatgttcggtgtggtagaatagtgaatgacttaaaggacaaggaatattattctttataaaatcggtaagtagacgttatggtggagggcaacttctacccggcgtcttcttttatcgctagcaaatggtaatggaggcttttgatgattgaacgacagaatgataaccaatttgatttagtggcgccctatgaaccagctggggaccaaccagcggcaattgaaacgttaactaagaacttcgaggcgggtgcaaaagcacaagtcttgatgggggcgactgggaccgggaagacctttacgatgtcgaacgtcatcaagaatttaaacaaaccaacattgatcatttcgcataataagactttggcaggccagctctatgccgagtttaagcaatttttcccgaataacgcggtagaatattttgtcagttactacgattattaccaaccagaagcttatgtgccttcaagtgatacctacatcgaaaaagattcgagtattaacgacgaaatcgacaaactacggcattcagcaaccagtgcgctgttggaacgcaacgatgtgattgtggttgcgtcggtttcatgtattttcggcttaggtgatccgaatgaatatcaagatcacgtcctttcgttacggccagggatggagattgagcgcaatgacttattgcgtcaattggtggatattcaatttgaacggaacgacattgatttccaacggggccgtttccgcgtccgtggtgacgtggtcgagattttcccggcttcacgtgatgatcatgcgttgcgggttgaattcttcggcgatgagattgatcgaatcgttgaagttgacgcgctaaccggtgaagtcattggtgaacgcgaacatgttgcgattttcccagcaacgcatttcatgactagtgaagaaaagatggaaaaagccattaagagtatcaaggctgaattagaaggccgactaacggaattgaaggcggacggcaagttgttggaagcccaacgtttggaacaacgaacgaattacgatcttgagatgatgcaagaaatgggctattgctcggggatcgaaaactattcacggcacatggaggatcgtgcggcgggggaaccaccttatacgttgctcgatttcttcccgaaagattcaatcatgatgattgatgaatcccatgtaacgatgccgcaaattcgcgggatgtataacggggatcgtgcccggaagcaaatgttaatcgattatgggttccgattaccaagtgcgcttgataatcggcctttgacgctacctgaattcgaagaacacgtcaatgaaatcatgtacgtttctgcgactccaggcccttatgaagctgaacaaaccgatattcaggtcgatcagattattcgaccaactggcttgttagatccgaatattgaggtccggccgattatgggccagattgatgatttggtcggcgaaattaatgatcggattgaaaagaacgaacgcgtctttattacaacgttaaccaagaagatgtcggaagatttaactgactatctcaaagaactggggattaaagtccgttacttgcatagtgatatcaagactttggaacgaacggaaattatccgtgatttacggcttggtaagtttgacgtcttaattgggattaacttgttgcgggaagggattgacgtccctgaagtctcgttagtggcaattttggatgccgataaagaaggtttcttgcggagcgagcgctcattgattcaaacaatcggccgtgcttctcggaatcaaaacgggcaagtccttttgtatgccgataagattaccgattcgatgcgcaatgcaatggatgaaaccaagcggcggcgttcgattcaagaagcctacaacgaagcacatcacatgacgccgaagacgattatcaaaccagttcgggatgcgatttcggttgttcaatcagtcgaacaccctgaagaagtcaagatgaccaacgagattgatttcgatagtatgtcgaaagctgaaaaactagaaatggtagaacggttatctgaacaaatgcggaatgcggccaagaaactggacttcgaacaggcagctacgttacgggataccatcttagagattaagagtgaaattgattaaaagaggtaaagcatggcaaatgataagatcgtcattcatggcgcaagagcgcataatttaaaagatattgatgttacaattccacgggataaactggtggttgtgacgggattgtcgggctctgggaagagttcgttagcgtttgatacattatatgccgaaggacaacggcgctacgtcgagagtttatcggcttatgcgcgccaattcttaggccagatggataaaccggatgttgattcaattgatgggctcagtcctgcgatttcgatcgaccaaaaaacaacgtctaaaaatccgcgttcgacagtcgggacagtcacggaaattaatgattatctccggcttttatgggcgcgggtcggtcatccaatctgtccgaacgatgggactgaaattagtagtcaatccgttgaacagatggttgatcgtgtcttagcgttacctgagaagacgaaactccaggtgatgtcaccgattattcgtggcaaaaaagggcaacataaaaaagtatttgaaaaaatccaacgagaaggctatgtccgtgttcaagtcgatagtgaagtcatggacgttagtgccgatatcgaattggataagaataaaaaacacgacattaatatcgtggtggatcgaatcgtcgtcaaagacggtgtccggtcccgtttatttgactcgttcgaagcggctctgcgcttatcagaagggtatgcgactgccgatatcatcggtggcgaacaactacttttctcagaacactatgcctgcccaatctgtggctttacggtgggcgcgttagaaccccgcttgttctcgttcaacgcaccgtttggggcctgcacagactgtgatggtttaggggttaagctagaagtcgatatggatttagtgattcctgataccagcaagacattgcgcgaaggagccattgcgccttggaatccaattagctctcaatattatccacagatgctcgaacaagcttgcaagtcatttaaaattgacatggatcgaccatttagcaaattaacaccacgccaaaaagacattatcttaaatggttctcagggtaagaacttccacttccattatgaaaatgatttcggtggtgtgcgtgatgtggacgtgccgtttgaaggtgtattagccaatattgaccgccgttatcgtgaaaccaatagtgatttcacacggacgcaaatgcggacgtatatgactgaattaacgtgtcaaacctgtcatggtgctcgtttaaatcgacaagctttggctgttaaagtgggcggccaagatatcgctgccgtttcagacaacgccatcaaagaagctttaccattcttcgatcaacttgaactttctgaaaaagacagtgtggttgccaaaccaatcttgaaagaagtgcatgatcggttaactttcttgattaacgtcggtctggattatttaacgctcagtcggtcagccgggaccctttctggtggggaagcccaacggattcgtttagccacgcaaattggttcgaacttatctggcgtgctctacatcctcgatgaaccgtcaattggtttgcatcaacgtgataatgaccgtttgatcgggtcactgaagaagatgcgcgacttaggcaatacattaattgttgttgaacatgatgaagatacaatgcgcgcggctgattacctgatcgatatcgggcccggcgctggtgaactcggtggtgaagtgatggccgctgggaccccaactgaagtcgaacataatccgaaatcattgacgggccgttatttagccggttccgaatatattccagtaccgctagaacggcgtcaaggcaatggcaagaagattcgcgtgaccggtgcggctgaaaataacttgaagaatctgacggttgatttcccattaggtgaatttgtcgcggttactggtgtttcaggttcaggcaagtcaaccttagtcaatacgattttgaaaaaagctttggcacaaaagatgaaccgtaactcagcaaaaccaggtcaatataaaacaattacaggttatcagaatcttgaaaaactgattaatattgatcaaagtccaattggtcggacaccgcggagtaatccagcaacgtacaccggcgtctttgacaatattcgtgatttgtttgcgcaaaccaatgaagccaaactacgcggttataaaaaaggccgttttagttttaacgttaaaggtggccgctgtgaagcctgcaagggtgacggcattatcaagattgaaatgaatttcttaccagacgtgtatgtgccgtgtgaagtctgtcatggcagtcgctataattcagaaaccttggaagtcgtctataagggcaagaacattgccgaaatcttagacatgacggtcggtgaagccacagtcttcttcgcaaacattcccaagattgcccgcaagttacaaacgattgtggatgtcggcttaggctacgtcacattgggccagtctgccacaaccttatcgggtggagaagcccaacggatgaagttggcctctgaattacagaaacaatcaacgggtaagaatttatacatcctcgatgaaccaacgactggcttgcataccgacgatatcaagcgcttgttgggcgttttggaacggttagttgaagaaggtaacacgatcttagtgattgaacataacttagatgttattaagactgccgatcacatcattgacttaggaccagaaggcggcgataaaggcgggacaattgtcgcgaccggtacgccagaagaaattgccaacgtcagtgaaagctatacaggccaatatttaaaacctgttttagaacgcgatacagcacgcacaattgccgctcaggattaaccagaagatggttgatagaatgtgtttaaaaagcgggcggttaagacagaatgattgctgtcttaaccgcccactttttgttttgtcaaatttagttgtagattgtccgtaaaaaaagtatcataaaggtattaacaacgagaggtgattgggaatgtttagaaaaaatgaatggcactttgattggtcagaatttatgacggggattattttcttaatcgttgcatattgcttgtttaatcaaccaggtaagacattatctggtttggtaatcgtgattgcgattgcggcgattattcggggaattgccaaaatcagtgcatatagtcggttacgtcaagagacagggatgcgcgcaacgttaatgttggtcgatgccattgtcgatgtcattttgggaattttgtttatcttgaatattccagctggagtggctgctttaggttatatctttgcattctggttcttgttcgattcaattgtggcattattgaatgtcggccatctcaagcaatttaacacaggcctatacatcgtttcgatgattctgaatatcttaggcgtaatcgttgggatcttattgttaatggatccagtggtgactgccgtaacgatggtgaccctagttggtttttactttgctttctttgggattaatgccatcatcatcgcatttgcaagacgtttatagtctctaaatttaatgattgcggaacaatttgattgttctgcaattttttttatggaaaaaataagctctttcaaatgcctagacattaggaatgaactcggtttaatagcattaaataacacgtgtcgagagtttcgacagctttcaatgacacaccaggaatgttacaatgataaaagcgaaaacttaaggggtggtctgatgacagatacattgaacttagtagtgattacagggatgagtggtgccgggaaaaccgttgccatgcaaagttttgaagatctaggttatttttgtgtcgacaatatgccaccgacattgctacctaagttttgggaattggttaaggagtccggcaaagtgactaagattgcattagtgattgatttgcgctcacgtgctttttacgatgagatcattgaaatgcttgctaaccttgataatacccaattcgtgacgactaagattctcttcttggatgcatcagatgaggaattggtttcgcgatacaaggaaacacgccgttcccacccactagcgatggaggggcgtttaatggacggtattcaaaaagaacggcgcctgttaactgaaattcgcaatcgagcacagatggtggtggatacttcaaccatgtcaccacgacaattaagagaaaagatttttcatgtcttcaagacgtcagataatccgtcattccatattgaagtgatgtcatttgggtttaaatacggtttaccaattgatgcggatatcgtcatggatgtccgtttcttaccgaacccatactatgtgccagcatttaaggaattaaacggtttagaccaaccggttagagactatgtaatggcgcagccagcgactgaaaagttctacgaacaatttagtgggctgttaaaagacatcatgccaggttatctcaaggaaggcaaaacaagtgtgacaattgcgattggctgtaccggcgggcaacaccgttcagtagcgcttgcccaacgattggctgatgatttatcgttcgattatccggttgacgtgacccaccgggatatgaagaaacgcaaggaaacggttaatcggtcatgacagctactaatcggattatccgggtcattaaagggcgacgaccaaaagtcgttgtgattggtggcggcactggactacccgttatcttaaagagtctccgtgaacagaatgcggatgctacggcaattgtcacggttgccgatgatggcggttcatccggcgttattcgcgattacattaacgtggtaccacctggtgatattcggaatgtattagtcgccttgtcagatttaccacagttaacgctcgatatttttcaataccgctttaaatcacacgatgcctttttctcagggcatgcgattggtaatttaattattgcggcgttatctgaaatggaatcaggtatttttgatgctgttcaacggttatcagaaatgatggcggttgacggtcatatttatcctgcggccaatgttgcgctgtcgttgaatgctgaatttaaagacggcacccagttaacaggggaatctgagattactgcagcacgcaagcagattaagcgtgtttgggtctcaaaaacggatcaagatgatactgcagcacccgaagccgttcaacaagtggttgatgcgattttggctgccgatgtggttgtcttaggacccggcagtttgtttaccagtattttaccgaatctaatgattaaaaacttaggtgcggcagtcaagcaaactaaggcggaagtgatttacatttgtaatatcatgacgcaaaaaggggaaacggaacactttaacgatgccgatcacgtccgcgtgttgaatgatcatcttggtcagaacttcgtggacacggttttggttaataccgcacaagtccctgaaaactatttggatcatcaaaagtacgacgaaattctctggccggttgaacatgactttgatggcttacgaggattgggttgtcgagtgatttccgataactttttgaagttgaaagatcatggtgtgttccataatggacaaaaagtagcgagtgaaattatgaatcttgctttccaggtcaatacagctaagcgaggtgaataatcgtggcctcatatgcaagtgaagtgaagaaagaattgacgcaacttgaagtgcatcctgaacatgcacgagcggaattagccgctttaattcggatgaatgggtcactgagcttgatgaatcaccaatttgttttaaacgttcaaactgagaatccggcgattgctcgccggatttatagtttattgaaacaaaattatcaagttgaatccgaattactagtacgtcgcaaaatgaagttaaaaaagaataatcaatacatcgtgcgcttaaagtatgataccaataccgttttaaaagaccttgatattgttgaggaggacggttttaccattcatacaaaggtgtcagaagatgtcattaatgaagatcagcgcgtccgttcttatttgcggggcgcttttctagccggtggctcagtgaataatcctgaaacaagccggtaccatctggaaatctattcattgtacgaagagcataatcaagatattgcgcgcatgatgaatcgttttggcttaaatgccaaaacgactttccgacggagtgggtacatcacttatctgaaagaggctgaaaaaattgctgattttctacaagtgattggtgctaccaacgcgatgttgaagtttgaggacattcggattgtgcgggatatgcgtaattcggttaatcgcttagtcaattgtgaaaccgcaaatatgaataagacaattgatgctgctacaaaacaaatcgaaaatatcgaatacttgcgcgacaccgtcggattagataatttaccggcgaagttgcgtgagattgcgctactccgtttggaatttccagatattacgttgaaggaacttggggaaaaaatgccgagtggggcaatttcgaagtcggggattaatcatcggctcagaaaattgaatcaacttgccgaagcccaccaacaggggaatggataaggggcaaaataaatcggtagtgtacaatatttgacttgtacaatataattaagtacaataactgaaggacattttatggaggaaaattatatggttaaaccagtattattagatgaacaactctgtttttcgatttaccgcgcacaaaaggcttacaatcatttctacggtaaggtattaaaaccttacggattaacatatccacaattcatcgcaatgcttgcattgtgggaacatggcaagatgtcagtgaaagaattagggcaccatttagaacttgatagtgggacactaacaccgcttttgaaacgcttagaagctgatggttgggtaagccggaaccgtgcatcagacgatgaacgccgagttgacgttaccttaactgaaaaagcagaaagtcaaaaagaagaaatctacgaacgggttggtgcttgcacaaactatctcgatttctcaagcgataagtatcatgaattacgtcaagaaatgaatgaagttgaacatcatttgaatgcgattcaaatggataatgcacgtttttcataaaatgacggataaagggttccaaaagatttgatggtaaattgaattttttggaaccctttatcgtacatacaaaaacaggtgccccgaggggggggcacctgttttttattttagtagttgacttaagtcagtcatatcaattgattcatcaaagatatggtcaccaataatgatggtcgggacgaatttaatattggcacgatcggcttcagcaataattgcggctaaattttctgcattatcttgtggcgttaatttgagattttgatcgatgtattttttaaattcatctggtgtcagatcattacgccatgttttttgatgcgtaaacaagaatgatagtgtttgcagcactatttcgggttgatcaaaaggtaaataggtatgggctaaattccccagttgtagatcctctttatccttaccaaaaggtttgataatacgttttagccgaccagctttgactgcttcagtcatcgtttcttcggattttaaaaaccacttgcggcaataaggacaagcggcgttgataaattcaattgatgttaatggtgcatctggctgaccaattgtaataccgccggtggttgtcacattctcgcttttaatcacactaatatccatggaagaccctcctttaagatactgccagtataacaaatttggtataaaaaaagggctagatcaacttgatctagtaactaatatatcatttctaacgaacactgtcaagcgtttttaaatactttttgaataaatattcaaactgatttaattacctgactcgttagcaaaaatgttttatctcgctgacaacatagactactatatcagctctacagcctttcgtcaactattaatctcaactgctatttatgaactttcataatctaaacagtcgctagtatccgcaatttatgcaaataaatgaactattaaacgaacaactcgcgcaaacaatataatataccgaaaattgaagcttattcacccacaaaatacactaaaaaaacttttcataatcccaatttttttcaataaaaaaagcccgcaagcaaatcgtctgcttgcgggctttagtttaatcttaatcgttattattgttgtctggacgcattgttgggaataataagacatcccgaattgatgcggcatctgtcagtaacatgactagtcgatcaatcccaattccaagtccgccagtcggtggcattccgtattccaatgcttcgatgtaatcttcatcgattccttcggcttcatcgttcccattttcacgttctttagcttgtgcttcaaaacgttcacgttgatcgatagggtcgtttaattcagtaaaggcatttgcatattcgttaccgtgcataaataattcccaacggtctgtgaaacgatcatcttcagcattcttcttagccaatggtgagatttcaactggatgaccatagatgaaggttggttgtaccaatgtatcttccacgaattcttcaaagaacgcattaatgatgtgccccacttgccagtatgattcatacttcacgtggtgttgatcagctaattcacgcgctgcttcaaccgtcattggttgccagaaatcgacacccgtcttttccttaattgcatcgaccatgtgaacccgtccaaaatcaccatcaagatcaatcgcttgtccttgatatgaaatctgaccagttcctaaaaccttgtgcgctgcaaatcggatgataccttctgtttcatccataacgtctttataatcaaagtatgcagcatatgtttctagcatcgtaaattcaggattgtgtttcgtatcaatcccttcattccggaatacgcggccaatttcatagacacgttccatcccaccaacgattaatcgtttcaaatgaagttcaagcgcaatccgcaagtacaagtttatgtctagcgcattgtgatgagtaataaatggtcgtgctgatgcaccaccagcttgaccatgcaagacaggtgtttcaacttcagtaaagccattgttatctaaatattcacggacagcagaaataatcttgctgcgtttcgtgaaccgatccaagctctctggatttgcgattaaatctaagtaacgttgacgatagatttgttccacgttggttaaaccatggaacttatctggcaatggtcgtaatgcttttgataggaaagtcaggtgcgttgctttaacagttaactcacccatgtcagtcttcataatttgcccagtaatccctaaatgatcacctaagtcagcctttttgaaaattaaatagttttcttcgccaacttcatctttacgcacgtaaatttggattttacctgaacggtcacggatgtcagcaaagccaactttccctttcccccgtttagacatcatccgtcctgcaattgtgacttctagattcttagcatctaaatcgtctttttcaattgcttcgaattcactgtgtaattccgcagccatatgtgttctatcaaaacgactaccaaaaggatcaattccttcgtcttttaacaattgtaatttttcacgccggacctttagttggtcgttcatttctctttgattatctttttgtcccaactgacaattcctccatacattcaattatctactaatgttgattttaacacgaaaacaccaacataaggaacctaatttgccattctcgcttcggtttcttctacaaagcggtctaaaatatcgccaacggcttgttccgtttccacttcattaaccgccgctttggtcttagccgcacgaggaatccctttcaagtaataggcagcttgttgtctgaattcacgacaagccacattttcacctttaagttcgactaaacggtgtaattgtaacttggccgttgcaattttttcccatggggttggttcagcaatcaattcacctgttcgtaagtaggtttccacttggcttaaaatccatggattaccgagcgcagcccggccaatcatgacagcatcagcacccacttcgtctagcatgcgtttagcatcttgtggtgtccggacatcaccgttacccataaacggaatcgttaattcagatttaacctgttttaaaatgtcccagtctgcttgcccggtgtacatttgtttccgtgtccgaccgtgcattgcaagtgctgaagcaccagcacgttcggcagcaagtgcattttcaacagcgaaaatatgatcttcatcccagcctgtccgcatcttaaccgttactggcttcttcacggcgtctgtcacgtatgagaccatttcataaaccttgtttggatctaataaccaacgcgcgccagcatctgtcttaacgactttattcactggacaacccatgttgatatcaataatatcagcttgtgtatgttgatccacaaatttagcggcttccactaaggtgtcttttgaaccaccaaaaatttggatgctaactggatgttcattcggatcaacaaacatcatccccattgtcttttgattattgtgcataattccgcgatcactgatcatttcacagaccactaaacctgcgccaaattcctttgcagttacgcgaaatgctgcgtttgtaataccagccattggtgcgacgactacttgatttggaatcgtcacgtctcctatttgccatgtcataatgccaacccattcccttcgtgtcttccgacaatatccaaattatcatagcaaaaaaatagtattcaggcaaaaatttgcgactattctattgcgcggctaaaattgcctttagttctgcttctgtaaattgatattgcttgccacagaaacgacaaaccgcttcagcaccgtggtcttcatcgattaattgttgtaaatccgctggcgcaacagaactgagtgcctttgcaaaccgatcctttgaacaatcacattcgtatttaacaggtattttttctaacgtcttcattgggagttcgcccacaatttcagtgataatttcctctgggctcatcccttgttggagtaattcagacaccagcggcatttctttcagccgcgcttctaagatatcgattaaccggtcatccgcccctgggagaatttgaatcatgaagcccccagcaacaccgattgagttatcttcattaacaaagactgaaacgccaactgcagatggtgtttgttctgatttagcaaggtagtaagtaaagtcttcacctaattctcctgataccaatgatacttgaccggtaaacggttcttttaagccaagatctttcgtgacactcaacgtaccagttgtcccaacaccacctttaacgtcaattttatttttgtcgttcaatggtaggttaacgtgtggattcgtcacataccctttaactgtgccttgcgcattcccatcgacaacaatcttcccgactgggccgtcaccttcaactctgactgtcatcttcgtatcaccttttaagccagcggcactcaataaaagggtgccgacaatcgtccgcccaaacgctgctgatgaagttgaccatgtgtcatgtttttcttgcgcatccgttacaacatcagttgcgttcactgcataagcacgaagttggccatcttctgaaatttgtttaattaaataatctgtcatctaaataacctcttttatggattgatgcaaaaaggtcgaccactaatcgtgtcgacctttttggtgtaacaatttatgcttcatcgtctggatgttgattatcctcagctggtgtcgattgatcatcttcatcaggtgtgattgtcacatcctttttatcagtttctttttctgaatcttcttttgcggcttcttttgcttcaagcgccttcttagcttcttcaaaagtagctgctttttcgcttggaaattcttcagcgttcttttctggcatcttaccatcattgaacaagctcaagatttctttttcgtttaatgtttcgtacttcaagagcatttccgcaattaacttatgttgttcacggtgcgcttcaataatttcgtgtgcttgttgatgtgcttcgtcaataatccgacgaatttcactatcaattgcagccgcagttgtttcggagaaggctgggccttgaccgtaagctgccccaacgaatggttgaccttctttttcaagggccactgtcccgagcttatcagtcatcccatattgagtaaccatcccgcgggcaatatccgttgcttgttcgaaatcgttagaagcaccagttgattgagagttgaaaataatttcttcagctgtccgaccaccaagtaacccaacaatttgttctgttaattctttcttactcattaagaactgatcattcttcggtaacatgatggcatatccgccagcacggccacgagggacaattgttaccttccgaacaacacgagaatcactaagaactaaaccaatgatcgcatgaccagcttcgtggtaagccacggtttcacgttctttaggattaatcacgcgatcccgcttagcaggacccgcaatcacacgatcttcagcttcatcaacatcagaagcatcgatatcggtcttgctacgacgagcggctactagagcagcttcgttcaataagttttcaagatcagcaccaacgaaccctggggtttgttgcgcaatttctttcaaatcaacatcatcggctaaaggtttgttcttagcatggactttcaagatggcttcacggcccttaacatctggacgaccaactaggatcttccggtcaaaacgacctggacgtaaaagcgctggatctaagacatctgaacggttagtagcagcgatgacgatgacgccttcgttccccgtaaacccatccatttcaactaacatttggttcaatgtttgttcacgttcatcgtgcccaccgcccatgccggcaccacgttggcgaccaacagcatcaatttcatcaataaagataattgatggggctgcttttttggcttgttcgaataaatcacggacacggcttgcaccgacaccgacaaacatttcaacgaagtcagaaccagagattgagaagaatggcacacctgcttctccggcaacggctttagctaataaggttttaccagtacctggaggtccttctaaaagaacacccgctggaattctagcccctaatgcagcaaacttccgtggatcttttaagaattcaacaacttcgactaattcttgtttttcttcttccgcaccagcgacatcagagaaacgtactttattagctttcttgtcggctttttgagctttggacttaccaaagttcatcatccgaccgccttgaccgccaccttgacccgcttggcccatcatcatgtagaataaaccaaacatgatgatcaatggcaatacaagacttaaaatacttacccaccaaccagattgtggttcttgaagggtttcaaccttggttgctgatttgtcagctaacttggtcattgccccaacttgtgaatcactttgtaataaggttgttgtgaagtgtttaactgatcttgcttttgttttttgtcctaaaagattctttttaggctgttctgttttttgtgctttacgatattctccagaaattttataaataccattcgttggttgaattgagaatgacttgaccttattggtcttcaattcacttaaaaatgtacttgattgaacttccttagactctgatccagcgttaccgttcatgaagaacgagaacacaccgactaaagccactaagataataatgtaaaacagactattactaaacagtccattctttttgttgttcatacgtgacctcctgaagcttctcatcatttgtgacacagtgtccttttgacactgttaaactataacatatctgacttttattgaccatttatttacccgaataaatttcaggtttcaaaacgccaattgttcccatatttctgtatcgttcggcatagtccaatccgtaccccacaacgaattcatttgggacttccatcccaacataatccgaatgaactggcacaattcgacggcttggtttgtccattaacgtgcagactttaattgagtttgcttgacgtgttttaagaatcgccattaagtaattcaacgtgcgcccagtatctacaatatcttcgataatgataatgtcgcggcctttaacactcgtatctaaatctttgatgattttaacttcacctgacgagatggtctcagcaccataacttgacacatccataaagtcgatttcaacatggaggtcaatttcgcgaatcaaatctgtcatgaagacgatcgcaccctttaaaataccaattaataacgggtttttaccttgataatccgctgtaatttgttttcctaagcgctgattaaccttttgaatgtcttctcttgaatataatacgcgttcaatatctttttctaacattgtgccagcctccgtaatttgcttaatcatctaaataacatagtatgtaccgtattttaccagtttgttcgcgattaaacaacgccgaaatccgtaaatccggccggccaagcaattgatttggggtccaaaccgcccatgcattttggcgctttgcctgtggggttttagtatcaatccataaccgttgaatggttttgtggtgtgccttatcaagcattattcgatctgttgcttgtagcgccctgagttgcagtggccattcctctggtgctaaccaaacgacctgttgccgttgaacttgattaggtagatggtcgatatcgaaaacaccaacttgttcgccattttttaaccgcagccattcattaatcgctaatgttcgtgttttgaccaaagaatccactatttggtggacaccaatccgaaaacaccgatactgcttttcaaaaatgatgccattgttcaatgccacttggccttgcggtttctgcgggttcgccaacaattgttgcacttgcattaactgggctgcctttaacgccggtaaagtcttgaaatatcgttgccacaccaattgccagagcgccctttgttgtgtctggttcaagccatcgagttggtctaaacgcccttcaattgccgccggctgttttttgattgccaacaatggcagtaacgccgcggttagatcatcttggtgtgccaccatttgggtcagactttgactgaaccgattggcattttgaatcaagtgtggattttctcgttttaaaagtggcaccaccgcatgtcgcatccgattacgaagaacagtttgttcctgattggtttgatcttcgtaatacctcaaaccaatctgatcagcgtaatcacgcagttgttgcttactaaaaggtaatagcgggcgaattaacgtccccgttttaaacggtctgacttgccgaatcccccgcatttcatgcaattcaccgctacgaactaatttcatgagcaaggtttctagttgatcgtcgccgtgatgcgcggtcaccaagtaatgcgccgattcggttcgcatgacttgatcaaaaaaagcatagcgaaattgacgtgccgccgcttcaacccctgtttcaggatgactcgcttttggccaatgttgaatgcgtaacgggatggcatgcaatcggcaaaactgggttaaatatttttcttcagccgtactttgcgcacgcaattcatgattaacgtgagccacaacgacttggggtcgttgtttttggggcagatgagtcaataaccacaataaaaccattgaatcgactcccgttgacgttgccaccacaaccttgtcgccggcttgccagaactgctctttttgaagatgtgtttgaaatgcttgttctaacataccgattcctctccaacacagacttgaaatgaaataaaggttgccccgaaagtctatcactaaactttcaagccaacctttatcaatttgttctattaactgcgacggccgccacggccaccacgtttaccttctgtattccgtttaatcgttgataagcgatcttcactatcttttaagaaccctgataataaatcatcaaagccttcttttttaggtgcgcttgaatgctctggtttgcgatatccaccgcgattattatttggacgactttgagggcgcggatgttcttgcactttaggttgatcaacggctttgcggattgataaaccaatcttaccgttttgatctgacataaccttcaccgtgacttcatcaccaacggttaaaacatcatgaatatctttgatataactatcggacacttcactaatatgtaccaacccggttttgccttcacctaaatctacaaaagcaccaaaattcgtaatgcccgttactttaccagcaacttttgaaccaacttcaactgccatataaaactacgtcctcctaaatggtcgtttgaactcgtcaaacttttaatcacttaagcgtgatatttaataaaataagtatagcacgctttgcccttgaaacaaggtcgtattctgaattatttttgttgctaatttaaattaggcgccttgtcctggggcaaactgaagatggtttcaccgtctttagaatagtaatacttgtaccgaatgtatttggccaagtaatcattatcatgcagctgttgcacttgaatctttaaatcagattcagttgctttagctttttttaatgtcttttctttagctgccgttgtttctctaatctcggccaatgaatgatgggtttggaaaatctgcacaccacaaattaagacgactaatactgcaacaatccccaagccacataagcggcgtttatgaacacgcttaacatgggctgccttgtcttgcacgattttctgggctgcttgttgctgggtaaatgcattctcgattttcgcaatttttcgactcacttagaagccccccatctcggaattaagttcattatagcaatttcacaaaaaggtcgtcaactaagatcccagattcttaatgacttttattaagatgctcaacaaagtcacaaaaaaaagcaccggcccatattaattcggccagcgctttttccttaatcaaagttttcagcttgtcttgtttccaaaatttcatacatttcagctgcatcgcttttcttcgtagtttcgatgatctgtgtgatgcgtacgaccatcgttttattaccaaatccgatctccagtttatcacccacgatgacattgcttgaagattttgcagggcgatcattaatcatgattcgacccttgtctgcaatttctttcgcaactgaacgtcgtttaatgattcgtgatactttcaaaaatttatctaagcgcattattttgtcctaccttttatttttttcgaaaggcgcaatagttgccggccacctggcatcgtcagccattctcgaatcgagaataattgccaccgtaatgctaatccgccaaataggagcacaccaacgagtacgccaaggcccgtccctaaaatcgcatgtcctctggaactaagtgattgtggtgcaaactgtagcgcaatcttaacacccagccacatcactgcacaaatcgcaagtaacttaccggtaaagcgttgcaaaccaagcgcttgccgtacaatcactggtgattgccgtaaaattaaggctaacacaacaccgaggctgataacagtcccgacactcgcgccaacaatttgatagtgttgcacaagccattgattgattgctactttaacgattaacccaacaattaaggctgccgttgttttatggaactgatcaagactttggagcaccgagttgcaagcattgatcagcgcgatgattgcgatactcaacatataccaaaccaatgcctgattaccatcagcatccccgaataagaaataattaatctgcggcatcaaaaccattaggccggtggttgctgctgccgataaacctaaactgatatgaatcagcgcttcagcaacttgttgaaattgatattgttgccgccgttgccgcgcttgtgacagactcggaatcaacgttgatgagaaggcaagtgacacgactaatcccagctggacaagtggttgcccacggtcaaaaatccccttcatattcttagcaagttcttccgataatccactgaggaccaacccttttttaactgtgaaggaatcaaccagctgtaataacacaattaatgaagcaaagaggcaaattgacccgccttcaatcgctaagcgttttgccaattgttgatacgccttaaaatcgatgccaccacggtgtggcgccttgagttgaaaggcggtttctgctggccgtaataaaatataggttgcaaccaagccgccaaagaaggcgcctgacatcgcccatgtgcccatttcatacactgaccagtgcagtttcaaagatagccacgctgccgccaagatgaccacgacccgcacgagttgctcagcaacttgtgaaaccgccgtcggtaccatattgaaaattccttggaagtacccccgcgtcaccgctagaaacggcatcaataaaaacataaacgataccatttcaatcagcggtgttaatgctggatccgccatcgcccccgcaattttcggcgcttgatactgtaaataaatgaagattgcagcaccaaagatgcctaacagtgcaaatgagcgtcttaacagctgcgtttgttcctccggattgacttgttcagcaaccagtttcgaaatataaactggaaagccactaagtgcaaacgtcatgccaatgccatagattggatagacttgttgatacacgtaaaagccggtgttaccgaccatattttgaaatggaatccgataaacggcacttaataccttcgcgataaacgacgcaattgataaaatgaccgcgcctttcatcagatgttgcatctgtttattttgcatgcctggcctccacttagcgtgcctaatccgttggttgttccgtgtgcttttgttctatcttcaagagacttgtaacaaaagttgccacttcactcaaccaatctgccggttgcatcttcggctggattacgagtttcacgcttaattgttcttgttcaaacccgaccgttgctttcaagcgggttgtcgataacgcttcaaaaatttgttcacctgaaacaaggtgactgcccttcgccgataaggtgacttgaatgatttctttcgtttgtttgatggtttcgattaacgcgtcatctgcattcatcttcaactgaccaatcgctaataaattagcgacttgatctggataatcaccgaaccggtcaattaaatcggcctgaatttcatcaaaggccgcttctgaatccatctggcgaatccgtttataaatttcaattttttggcgttgatcattaatatacgcgtctggtaagtaagcttccagtttaagatcaatttcggcattcgttttagcaacgacttgcttcccttgtttcttagcgacggcctcacccaacatttgcgagtataggtcaaacccaacagaatcgataaaaccatgttgttgcttacctaataaattaccagctccccgaatcgataaatcacgcatcgcaattttaaacccggaccctaattcggtaaagtccttgatggcctgaagtcgtttctcactaacttccgttaaaaccttatcgggtttatacataaagtaaccgtaagcaatccggctactacgtccaatccggccgcgtaattgatagagctgtgaaagaccgtaatgatcagcatcttcaacaatcatcgtattgacgttaggcatgtcaaccccggtttcaataatcgtggttgtcaccaagacgtcgtatttaccttggacaaagtcgtagatgacaccttctagttgtgcctcggtcatctgaccatgtgcgaacccaaccgttgcttcaggaaccagcgcttgaatctcatcgaccgtgcgttcaatgtcactcactcgattatggaggtaaaacacttgaccattccgttctaattcccgttcaatcgcttcgcgcatcgcaccggcattttgttccatgacatacgtttggataggatagcggttagtcggtggcgtttcaatcacagataaatcacgcacaccgagcatcgacatgtgtaacgtccgtggaatcggcgttgccgtcaacgttaacacgtcaacttgtgccttcaactgcttaagtcgttctttgtgttttacaccaaagcgttgctcttcatcgacaatcaacaagccaagatctttaaacttgatgtcttgcgataacaagcggtgggtgccaatcacgatgtcgactttgccctctgctaagcctttgagcgttgccgtcacttctttgcgcgttttaaaccgtgacagtaaaccaatttcgaccgcaaaatccgcgaagcgtgtcagcatgttttcataatgttgttgcgccagaatcgttgttggcactaaaaaggccacctgtttaccggcttcaacagccttaaaagccgcccgcaaggcgacttccgttttcccaaagccaacgtcgccgactaataatcgatccattggacggacgcgttccatatcatgcttgatttcagcggtactgcgtaattgatcatctgtttcaggataggggaactggccttcaaattcagcctgtaatcgatcatcttttggaaaggcaaatcccttttcagcctcccgttgcgcataaagttcgattaaatcatcggcgatatcttcaatctttgccgaaactttactcttagtcttttgccactcgccaccgccaagcttattaatcttcggtgttttggcctcggcagagacgtatttttgcaccatattgagttgagtgactgggataaataacttcccattatcccgatacaagatggtgatgtagtcttgatgaaccccatcgacttccaaggtttccatgccgacgtattcgccaatcccatgattgacgtggaccacgtaatcacctggttttaattcgttataactctttaaccgttctgcattggccaaggtttgccgccggacttttttcttcggcgccgtattgaacagttccttttcagttaagaccaccagttttaaatccggtaattcaaagccattttgaagtgacccttgaatgatttgtgtccgccccgtctccaactgagtcttattggcgatgacggcatcaatttcaaagtcgtggaacgtctgatcaatcttcttgacccgtttaggatcagacacgagcacaatgaccgtttgtttttgcttttgccaatgcgcaatctcggttttcaaaagcggcatttggctaaagaattgttgcaccgtccgcgtgggtaaattgttgagtgcatcgagttttaacttccccattcccttttggaacagtgatagatagagatgcgcatgtgtatcttttttgatgagcgcttgggcatccatcatgagtcgttggtctggcaacatgcggtgggtttccaacatatcggtttgccagttggccgcttcttcagtcaaaatccgctgcgtttctaaaatgcgcggatagtcatcaaaaatcactaagccactctttttaaagtaatcaatcagacttgattgatctggatacagataatcaacaaacaacgctaaattctcaacgcgttcaccggccaacaaccgttcaatcggtgtttcaaagtttgtcgccaattgtttttgttcagttttatccgttattttggccgcaaccgcctcataagctgcttgtaatgcctcaccagccatttccaattgtgctgtgttggccaataagtcagtcgccggcataatttgaacactatctaaattctcaatactccgttgcgtatctgcttcaaaagaacgcagtgaatccacttcagtatcaaagagttcaatccggaccggattttccgcgtccagtggaaaaatgtcaataatatccccccgcattgcgaactcaccaggtttaccaaccaacttatctcggaaataacccatttcaccaagttgcgcagcaagtgcctggggatcaacttcactatcggtattgattgtgagttgactatcttgccactgacgcgctgtaggtaataaccgccgcatgcccgcgaccgatgtaatcacaattccttttttgcctgttgctaaaaaactcaacgttcgcacacgttccgctctggactcaggtgaactaactgccatttcagccgccatcacttcttcaactgggaaagtgtaaatctgatcactattgagtaaattactcaaatcatcagcaacttgattggcttggaacgtattactctcaataatcaataagggttgttgtttataaatcgtcgccaaaaacagggttttcgctgatcccgaaagccctgtaagtagttgtttaatccctggtcgttgattctttaaaacggattgcacctgtttggtctgccccagcattgtcattaaatccatgtaaaagttcctttactttcttattataatggcgcgaagaaacgtgctctgttgctaaccgcaaccaaacgcactctgtttttgaaacgtgtcattggcagtagattcctgcgctttgctacacttttcaaatcgccgcttgcagcgtcaattcgccaagttaggcaaatgctcagaatctgaccaactgccaacgacactctaattaaatttattcatcgttttcatgaagtcgtcgttttggcaccagtcttctagtgcttcgcatgcctggtctagtgcttgattgataattggtgcgctgtctttgtcaaacggcgttaagacccagttaacgactgtacttttttgtggatgttgaatcccaactttgacacgcttaaattctgagctttggacacttgcgatgatactcttaatgccgttgtggcctcccgctgaacctttttgccgtaagcgcaacttgcctagcgttaagtccatatcatcttggataactactaattcatctaggttaacttggtagtatttcattaaaggcccgactgaacgaccggaatcattcataaacgttagtggtttcactaagagaatcgtttccccttcatatttaaagctcccgtattcagcttcaaaatcatgcttgtttaaggtcacattaaaccgttcgcataattgatcaatcaccataaaaccaatgttgtgttttgtctttgcatacttactgcctgggtttcccaagccaacaatcattttcattattaacgtcctctttttgactggcgctatcacgcaaaaattctgagcagttaattctccccagtcgccagttgatattaagaaccattataccatattcagtttatttctctctttgtgaaagaaatagttttctgaaaatttaaccaaaaatcgcgaactttggtgtaaattatgctatactggttttcgaaatgaagaattgatttacagaagggacgtcattatattggcaaacattgaaaaagatcaccaaaaagttatcctcgtcggcgacggcgctgtaggttctagttacgcttatgcattaactttacaaggtattgcacaagaagttggtatcgtagatatctttaaagaaaaaacacaaggtgatgcaatcgatttatctgatgcattagctttcacttctcctaagaaaatctatgctgctgaatactcagatgcaaaagatgctgacgttgttgttatcacagctggcgcaccacaaaaaccaggtgaaacacgtttagacttagtaagtaaaaaccttaaaatcttgaagacaatcgttgacccaatcgttgaatctggctttaacggtatcttcttagttgctgctaacccagttgatatcttgacatacgctacatggaaattatcaggtttccctaaagaacgcgttatcggttcaggtacatcacttgactcagctcgtttccgtaaagacatcgctgaaatggttaacgttgacgcacgttcggtccatgcttatatcatgggtgaacatggtgatacagaattccctgtatggtcacacgctaacatcggtggtatcaagatttctgaatgggttaaagctcatccagaaattaaagaagaagaacttgttaagatcttcgaaagtgttcgtgacgctgcttacacaatcattaacttaaaaggtgctacattctacggtatcggtactgcattagctcgtattactaaggctatcttagacgacgaaaatgctgtcttaccattatctgtatacatggaaggccaatacggcttgaacgatatctttatcggttcacctgctgttattaaccgctcaggtatcacaagcatccttgaaattccattgacagaccacgaaatggaaagcatgcacagttctgcaaaacaattaaaagatatcgttacaaaagcatttgctgaattagatatcgaaactcgccaataagctctttgctgttggtcaaacgactctcattaaatgagagtcgtttttttatggtgttaatattatcaactacatattttttatgaaaaaggctcaacctctttttctatgcattatgatgatcacttgtttgtgtgatttgattaattttcgcgtgtaattcatggacttcagcttccttatccgctaacgctttatcaaatgctttttgattctttattttttctgcttcaaccgctgctttaatttgagcagcttgattgtcgcgtaattcagtgacttctttggtcatttccttttgtgctttccgttggctcaacgtgctgccagtcgctgccaagaaggtaatgatggcgccaatcaataatgacaccaaaataacgatgattaatggccatttaacatgggtgaatccaaagttaatggcgactggttcaacgtttaaaacagcaaaaattacgacaattaatgctaggaccaatactgtaattaatcgaccttgttttttcataaaactgcccccctacttcttattcaataagttaccggcaacatagtctccgatatgtggtgccagttgatagaattgtgcaccgatcgccatcaaccatggtgcattaatttcacgttttgcatgcccgattgttttcacaatccgataagctagttgatcaggatctaaaacaacccaatcgaccgatttcaaataattaccggtcttatccgcaatatcaaagaaagctgtatcaatcggcccaggattaacggtagtcacttgaaccccaaatggttttaattctaagcgtagaccatttgaatagccaacaaccgcgaacttagttgccgaatagatggccgacttaggtgttgccatcttgcccgccattgaagcaatgttaatgatgtggccgctaccttgttcaatcatcatccgcccaaaagcgcgcgtcatgtacattaaacctagcacattaacccggaacatctgctccacaacggtcatggatgtgtcgaatgcattttcaaaacttccaaaaccagcagcattgactaacacatctggaatcccgacttcagtttgcacctgagccacaatggtttcaatcgctgctggatcactgacatcgaggacatatgcatacgccggctgtcctgaaagccggtgtgcttcttcgcgaaccgccgccaattcagcttctcgacgggccaaaacgacgataattgcccctttactagcggcttcataggcaatcgctcgtcctaaaccagacgagccgccggtaatcaccacaattttacggtttaaatctctcaatgctgctaatttagtcatctgtttactcctttcgaccatgaaacggaatgtcatagatatctaagtcactaactacttttgtgtttttaaaaatatcgcgggcatcattttgtaaatcacgcactgcttgcccgaggtaccgggcagaaatatgggtcaataataaccgcttcacatgcgcggcttttgcgacctttgctgcattaatgttagttgaatggaaatattgacgcgcaatcttttgttcttgcttaccgaaggtcccttcatgcactaatacatctgcattagccgctaagcgttcaattggtggacattggcgggtatccccaataatggtcacaatccgtcctttttgagcatgtccaatgtaatctttgccatcaatttggcgcccatcagcgagtgtaaccacttctccctttttaatctttgcgtatacaggaccagccggaacaccatctgcatgcagtttctcaacttgcagttcccccggatggtccttttcaataatccgaaaaccataactggcaatccgatgatccaatttagcgcattcaacccggaaagtcgcatcatcaatcaaaacgccttcttcaggaagaacgacaaagttcaatggatacgttaaatgactttcagagatttttaaactcgtgcgcacgtattcttcagttcccttagggccgtaaatcgtaagtggttcgtcgccaccttggaaagatcggcttgataaaaagcctggtaacccgaataaatgatccccatgtaaatgtgtgagaaagatctttttaactttgcgcggttttaatgtcgtttttaagatttgatgttgcgttgcttcaccgacgtcaaacaaccacacttcatttcgttcatccaataatttcaatgcgacacttgtgacgtttcgttgtcgtgctggaactccagcgcctgttcctaaaaattctaattccatttagctcttccaatctatctttaattcaacgctttattttgccgcgagggctttggtaataatggcggcatattcattgaccccagttgggttcggatgcaccttatcttggtagaaccagtcactgtgtttggcagcctgtgaataccaatcaatcaccgttaagtttggatactgtttagttgcatttttaagcgcctggttaacatcattttgccaaggacgcgttgggacaaacgcgttgagccaatagacttttcgcttagtcccaatggctgccataaattgcgccatctgttcttgcgtaaaggcgccatttgttcctagactgaccagtacagtatcgctaagggcttgtttttgatcataatcttttacaatttgaatactttgatagagttggcgcccaacagccgcatcaaccaacatattcgggaataacttctgtaaagcttgactaccgtcgagtaggacggaatcaccaattgcagtcaccgagatattctgggcccgttgaatcgtcacttgactcaagccatatttttcaaattcttggttgattggatgcttttgcgcagccgcctcagccgctttttcagcttttgaagttggaccatttgcttgtccagctttattctgggcttttgcttttttaatcaacgcatctttacgcttttggttagctttttgattttgcttaatattgaccgctaatgccgatttatgcgtatctggcgccggttggaatggcgcttgaaacgccccgactaacccgattaaaaagacaattgcgagtccagtcactcgaccaaccacccgattccaatgtggttggtgcataaattgcttcaattggtgccataactgcttgtacggatagtgtgctagtggctgttcaataaaccggtaggataattcggtcaatccgaaaataatcgccacttcaatcactggatataaaaccgggtgatcagcgatatttttgaagattgtttcaaagaaaatcatcaccggaaattgatacagataaatcccgtaactccgtttacctaaccagttaaagaccggattcgtcaataaccgattccaatcagcgcctggatgagcgacaactgccactaaaacacagactaaagcactaaacagaaatagtcccccgcgatagacaagactactctcggcattcaacttaaccattaaccaaaccaaactgaggacactcactaacccgatgccatcgaggacgaggcgttgtttaggcacaatcttttgcttaagggctgttgatggccaaacaaacgccagcgctgctcctagtaaaattgaaaagacccgcgtatccgttccataatacaaacgactagggtcagcattgggttggtacaaaatggccatccagattgctgaaacaacactgactgctagtaatacttgggcaatccgatttttattcttaagaccaataatcaaggccacaacgataaaaggccaaattagatagaactgcccttcaatcgatagtgtccacagatgggtaaacggcgactcattattggcaaaccgatcgaaatacgactgaccatgtccaatttgccaccagttataaacgtataaaatgttcgtgataataatctgattaagttgctgtaacatttcccgctgaaaaagcgtgatgtacgcgcccgttgcaaacagcatcgttatcagcccagggtacaatcgttttacccggcgtaagtaaaaactttttaaattaatccattgattttgttcccactcttgaaccaacaaatcggtgattagataccccgaaaccaccatgaagattgggacccctaaataaccaccggtaaaagtatatggcatcagatggtataaaataacaccaatcacgccgattgcgcgtaaaccatcaaagccagtaatgtaacgactattctttaaacgcttcttgcccgccattttttcaacctactctacattctaataactgctattataacaatattttagtgatgtgcctacattaagccctgttattttatgcatcccatagaaaaaggaagcattcaaaaatgaatgtcttcctttcttgacgtgcctattattcgacaaattcaaacgtaaagttatcaattgccactaaatcaccatcatgtgcgccactttcgcgtaaggcttcgtcaatccccattgaacgtaattgacgggcaaaacgcatgacaccatcttgatgatccaagttactcatcttgaagagtttttcaaccttgtcaccagacacaataaacgtgccgtattcatcttgttcaatgatgaaagcaggtgcttccggttgatattgataaagtttttgcgtttgaacttcttcgacgtctcccattgggaattcagtcgtttcagctaataagtcagctgtcttgttcatcaatgattgcaccccttgatgcgtgatacttgaaatttcaaaaatctcatgtgtatcgccggcagctgctaatttttgtttaaactcggctaataattcagaagaacctggtaaatccatcttagtcgctacaatcacttgtggtcgttctaagatttttggatcataggtctctaattcgtgattaatttgttggtaatcttcaaatgggtcgcgacccgtttgatcgtccatttcgattaaatgcaagacaacccgtgttcgttcaacatgccgtaagaattgaatccctaaaccaacaccgtctgaagccccttcgattaaccccggtaaatcggctaagacaaagtcccgaccgtcatcgagttgcaccatccctaagttagggaccaacgttgtaaattggtaactagcaatcttaggtttcgcacttgtcaccactgacaacaacgttgatttcccaacagatgggaaaccaaccaacccaacatcagcaagcacttttaattcaagttgaatgctgcgttcttcaccaggttcaccgttttcggcaacttccggcgcactattacgggcatttgcgaaatgcatattcccacgaccaccacgaccgcccttagcaatcactaattgttggccatcttcggttaaatcaccgagtaattcattggtttcagcatcgcgcaccgttgtaccaggtggcacttgaacaaatgtatcctcggcaccgcggccgtacatttgtttattctgaccattaccaccactattggctttaaagtgatgacggtaacgaaagtccattaatgttcgtagaccttcatctaccactaaaatgacacttccgccccgaccaccatcgccaccggctggtccgccaagtggcacaaacttttcacggcgaaatgcaactgcaccatcgccgcctttaccagctttcacatcaattttgacttgatctacaaacatattttgactccttctcatcgttaaacagtaccttatatactaccgaaaaaaagactaaaagtaaacagataactggttaaacactgaattggctctatcatcgataaaaagcgcactgagtgagtgacctcaatcagtacgcttttcattcgttaattaatggctagctggcaccaatttaaattggctccatggtttcaaatagtctaataggaataattctgtaggcgtaatacggccaaccacattcacgcgcccgtcatttggcatggctttgagggcaatttgggtttcccctttatactgaccgtaaccgacgttatcgattaaaatatcaccgcgttggatgtcaactgtatggtgggctgggaaaggcaggtctttaaaaatgacccgtgtcatcgttgaccgtagaagatattctgaacgatcgccacgataactatgcagactttcaaagaggaccttgcgttcatcagccgtaatgtcatctgcgacgtcgattgcgattgctgggaattcagcgttaaagacgtcatgcatcgtcttcaattctgcttccgaagcatacgcattaccgacaataatgtcatcaatgttatccattaaaacgtaatgtttcatctgcgttgccatcgttaaatcgcgatcaacttccatcgtgggcaacccatcttgtgttggccatggtccgaaagtcgcttcatgtgaattgacaaacgctgctgtattcaaattgtattttgcaaattgcgccgtacattgtttgaaaaagtcttcacctaatcctgagaaccgatgtggatagaagttatgacagcctaacaagttttcccgtttgggtgaataactcataatgttatcaacgtaacttgtcccttgactcatattaatttcaatttttaaattaaacggattgcgcgtcatttccgcttcttcttggccggtaaaaccgttgtccaaccgaattccccaagcaccaagttcatggaaaaaacttaaattatcatatgaaataccgagttgcttgaacaaacccggattgatatcaatcatgacttgcattcctaattggttggcatgggctacaacccgtttaaagttgcctaacacggcttcttgatcgccagacacctccaataatgatgtaaagacgcgttggaacccatattgatgcgctaaatctaagtaagccgcatccttttcaaaagttgatcgttctggataaattgaaacgcctagttttcccatgaatagaacctcctaataattgggctataccaccctgtcatctattagtctagcataccttaagcacttttgaaaactcttacattacttttaaactggtctatttctggcattgtccgcagtttgctcactaacgcaccaatctttttttcggtctatatcagcgttttgatggtttttgaacgtttttgaaatatttcgattgcttttgaatggaaacgatgtcataatgatgctacggaggttttgtcatgttaacagaagaacgtcaccaagcgatattacaacttttaaagcaacaagacgtcgttaagatgcaatctttatgccagttattgaacgcttctgaatcaactgtccgtcgtgacttgcaattgctcgaagaacaagggcttgctactcgaattcacggtggtgctaagcgcatcaacacgttacaagaagaacttggccagattgaaaaaaacggcaagaacgttcatgaaaaaaacgcgattgctaagtttgccgcagcacaaatccaacaaggctgcgtcatttacttagatgccggcacaacgacccaggcaatcatcccctacttaagacctgaaatgaatttgacggtcgtcaccaatggggttgataccgcttctctcttagccgatcaccaaattcaaacctttctattaggtgggcgtgttaagagcaaaaccaaagcgatggtcggtgcggctgctttagaaacccttttgcaattccaattcaatcaggcgattcttggcacaaacggtatcgatgttgaagctgggctaaccacccctgatccagaagaagccactctaaagcgctttgcgattcaacaagcgaaccaaacgatggttttggcggatcacacaaaattcgacgctgtttcgttcagtaagtttgccccattggcacaagtccaattgattactgatcaattgtcaccatctgtttacaaacactatcattcacacacagaaatccaggaggttttatcttgatttatacgattacggcgaatccatcaatcgattacgtcattcaacttgaaaaactaaataccggtaacgtgaaccgcgtccaatctgacgttaagctccccggtggtaaagggattaacgtttcacgcatccttgccgaattagcattaccaagcgttgccctcggctttgtcggtggcttcactggtcaattcattcaaagcaaactcaacaacgcttcgatcgactgtcgattcactgaagtcgaagaagacacccggattaacgtgaagttaaaagacaatactgaagaaactgaaattaacggtcaaggcccacacatttcagcagaagccgttgccaacttgaaacaacaactggctaagctggaagccggcgatattgtcttcatgtctgggagtttgccacctaatttaccggctagtttctacaaagacttaatcccattgattcaagcgcacaacgctgaatttgtaattgatacaaccggtcaagctttgttagacacattggctgaaaaaccattggtcatcaaacccaaccatcacgaattggccgaactgttcgacacacactttgccaaccaaagtgaaatcatcgccgctggtcgcaaattattagaccaaggtgcccaacatgtcttggtctcaatggccggtgacggtgcccttttaatcacaccagaccacgcttacctcggtggtacacctaaagggacagtgattaattccgttggggctggtgattcaatgatcgccggttttgtcggcacattcgcacaacatcacgatgcactcgccgcttttaaaacaagtcttgcttgtggtagtgccaccgccttttctgaagatttagccactagcgctaagattaacgaactcttacctcaaattgaaatcacacaagttgattaattttaaatacaaaggagatttattatgaacatccaagatttactcttaaaagatgcgatgatcatggatttacaagcaacgactaaagaagccgctgttgatgaaatggttgcccgctataaagacatcggtgttatcacagatgacgccctctatcgtaaagatattttggctcgtgaagcccaatcatcaactggaattggcgaagggattgcaatgccccatgcaaaagacagtgccgttcaacgcgcaactgtgctattcgctaaaagtcaaaacggtgttgaatatgacgcactagacggccaacccgtttacttgttcttcatgattgccgctccagaaggcgctaacgatacgcatttacaagccttggctggtctttcatcccttttaatcaacccacaattagtcgctgatttgaaacaagcccaaacaccagaagacgtgcaaacgctctttgctaaggctcaagctgctaaagacgcagaagatgcgaaggaagaagctgaagaagccgctaaagcacaagccgcagccgcaacgccagctgatgatcaaaaaccattcatcgttgctgtcacagcctgcccaactgggattgcccacacttacatggccgaagctgccttgaaagaaacagctgctaaaatgggcatcgacattaaagttgaaacaaacggttctgaaggcgttaaacaccaattaaccgctgacgatattaaccgcgcaacaggggttatcatcgctgccgacaagaaagtcgatatgcctcgttttgatggtaaacatctcttgaaccgtcccgtgatcgacggcatcaagaaaccagctgaattgattcaaaaaacattggatgaagaaggctcaatctatcacgcaactgaaagccaatcaagcgaagaagcttcagctgacaagaaaaccctttggagtcgcatctaccaagatttaatgaatggtgtttcaaacatgttaccattcgttgtcggtggtgggatcttgatggccatctcattccttttggaacaaaccgttggcgcacattcaaccacttttattttcttgaactcattaggcaataatgcctttaacttcttaattccggtccttgctgcttacatcgcgatttcaatcggtgatcggcctgccttaatgcccggatttgtcgggggctacatggctagccaagcaacagccagtgtccttgcttcaaagagtccagccggattccttggcggtttagctgctgggttcatcgctggttgggtgatcgttggtttgaagaaagtcttcaagaacttgccacaaacccttgatggtttaaaaccaatcttaatattccctgtattaggactattgattgttggctttattatgtacttcatgatcaacccagtctttgctcaaattaacctctggttgagtaccttcttaacacacttaggggctggtaacgcattactacttggtgcgattttaggtggcatgatgtccgttgatatgggcggtcctttcaacaaggctgcttataccttcgcaatcggtgtcttcacaaccaccaaagatggttcattgatggccgctgtcatggctggtgggatggtcccaccattggcaatcgcggttgctgctactattttcaaaaacaaatttaccggtagtgaacggaaacaagccttcgcaaactatgtattagggatttcattcattactgaaggtgccattccatttgctgcatcagatccgttacacgtgattgtttcaagtgttatcggttcagcaatcggtggtggtttaacccaattatggcaaatcactgtccctgcaccacatggtgggatcttcgtggcaccacttgccaaccacggcctactctttgtgcttgccgtgttaatcggaacatttgtcagtgccctaatcttaggcctctggcgtccagtggcaaaagaagcttaatttaaaaagtcgtagtcaaatgactgcgactttttatttatcttgaaaatcagtattgtgcttttgtttccattcattaatgtaattcaaacgttgtttcatccgcgtttcattgccttgttcggtcggccggtaataaatatggtcggcgatactctctggtctagttggcatcgtggtcaatctatcatcgtagaaatgtgcgagttgatatcctttgccgtaaccgacttccttcatcaatttcgtcgccgcattacgcaagtgcaatggcacgggttcatcaatcgtctttttaatatccttttgcaccgctgtccgcgccttataagtggcgtttgatttcggcgcaagcgatagataaatcacgcactgtgttaaatgcacgtcgcattccggtaagccaatcgcctgacaagcttgaaagacgttcattgctaaattcaatgcattgttatcggccagaccaatgtcctcactcgcaaaacgaacgagccgccgagcaatataaatcgggtcttcgccgccgtcaatcatccgccccaaccaataaatcgctgagtcgacatcactattgcgcatcgacttatgcaaagccgaaataatattatagtgttcctcaccgtctttatcataataggcggtttttttatttagcagttcccccaatagatcgccatcgacggtcacttgatggtcttgcacatcactattaataactaacatttctaaaatattcagcgccgtccgtgcatccccattcgaaaagatggcgacttgcttcaataattcatcactgatatgaaccgttaaatccgggaaggcttggggcgcctttaaaacccgttgtagcaactcaataatgtccgcttccgtcaattgctttagcacaaaaacgcgtgaacgcgacagcaacgctgaattgatttcaaacgacggattttcggttgtcgcaccaattaggataatgctgcctttttcaacatacggtaaaaaagcatcctgttgcaccttgttaaaccggtgaatttcatcaataaagacaatcgtccgctcacccagttggcggttttcttcggcttcattcataatcttccgaatctctttgatcccattcatcgcggcactaaacgtgataaatttcgaagccgtcttgcgcgcgataatctccgccaacgtggtcttcccaacgccgggtggtccccagaaaatcatcgaagtcacttgatctttatcaatcatttcgcgtaaaaacttgcctggtccgactaaatgcttctgaccgacaaaactgtttaaatcagacggtcggacccgattagcaagcggcgcattcatcgccatctcttgatcaaacaaagaggtttgtcccattttttcaccccactttagttgttgttaattgaaacttcttaaaatgtgcccgtaaataacttaaggttaaactctccgcgtctgaggcaacaagctcaaatggtgcacccatcgccatcacttggcccccttgactaccaccttttaggccccaagtcgatcgggtaatcggcattggtcatcaaatcaaggtcgtgggtaatcatcataatggtggcacccttggattttagctggttgatgacgcctactaaggtttcaacatcgcgcggatgcaagccaacagaaggttcatcgaagacgaataaagtgcccgcccgttttttattcaaatgcgttgcgagttttaagcgctgtgcttcgccacccgaaagactcggtgtactttcaccaaggtgtaaataagctaagccaatttctttgagaatcttaagttccttttgaattgctggcacatctgcaaagaccgggattgcttcttccaccgataaagccaatagatcaacgatgctatagccttgccacttgatggcttcaatctctggtttgtagcggttaccatgacattctggacaggtttcttccatgtctggcaaatattgaatatccaaaataatgctgcctaacccaccacagttcggacaggcgccttctttattgttatacgaaaagtgcgcgatcccataatgatgcgcttgtgattctggtaaaccagcaaataatttccgcagattgttcatgatactcgtataagtcgcgagtgttgagcgtatattcttaccaaccggcttggcatcaatgctgacgactgacgttaaatcggtcgtcaactgggtgacctgctcgggtaattgctcatgttggtggtgcgcttcaattgctggcactaaactatctagaatcaaactcgtcttcccggcgccggaaaacccagaaaccgccgtaatttggttatctggcactttgattgtgacatcatgcagattaaaatattggccaaccgtcatcgttgtctgctcaccagtcgttgcggcagtgactttaggatataagatgttcgctcgaccagcgatatagtggccaatcagggactgtggattctggatcaaatccgcgggtttcccttgggcaatcacttgtccccctttgcgcccagcttctggcccaatttcaatcacccaatccgcttgactgatgatattcacttcatgatcaactaccactaacgaattgccttgtgccactagctgccggaaaatatgaattagcccttcgacgttgtcaggatgcagcccaatcgatggttcatctaaaacgtacaacacaccagttgtcgctgttcgcaacgtccgcgccaattgaatccgttgaagctcgccagttgacaatgtattcccattgcgcgacaacgttaaataatccaaccctaattctagtaacggttgcagtgtttctaataggttcttaaataaaattgtcgccatttgctgcatttcatccggtaagtcggccttagtagcacgcacccaatcttctaatgcgcctaacgtcaaattagaaactgctgcaatgttttgtccgccaactgtttgggtcagtaatgccggatttaaccgggtcccatgacacgttggacaggttgaaaaatggaaaaatgaattgactttagccattgcccgatcacttttaaccgattttagcgattcataaacagcgtcataagcattttcatagagggtattctccgtactaaacacacggcccgttgaggtatggaaatcaaccgcatacttcgcccgtttaccatgcaggacaatttctttttccttggccgtcaagtccttgtaagggacatcaattcggaccccaatgtgggcagcaacggttggcatgaaattccggcccggcaatcgccatgaggcaatcgctccgtcttcaatactgagattttcatccgcgatgattttgcgatcatctaacgtttgaatctgccccgtcccatgacattctgggcaggcgccagctgaattaaaggcaaagtcttcggccgatttagccataaactgcacttggcaagtagggcacgtaataatccccattttatcgccagctaagtccatcgcttgggcaatttttagacttggttgaatcacgtgcccatttggacaacgtgtcgtccctaaccgtgaaaaaatcaatctgacgacattaaaaatctcactcatcgaaccaacagttgaccgttctgatggcacacttggtcgttaccgaagtgcaatcgctgatggaatatgccgcacttcttggacttgtgagcgtttattctgcgtaattcggcgccgcgtgtacgtcgacaacgcctctaaataacgccgtgagccttctgcatataaaatccccatcgcaagcgaactttttcctgaaccagacggtcccgaaatcgccacaaattggttcaacggaatatcgacgttaatatttttcaagttattgacgttcccgccacgcacttcaatctacgttggttgttcaattgtcattattggttcgctccccttttgcttgacggttaaaaacggccgcctctgcttctaaattcgctaaaattcgttctaaatagccgtcaacagctgccacttcagcatccgaaaagcccttgtaaaaaacggcgctcaatcgttgactaacgtcatcaccgacctgttgctgattagcgccttgttcagttaagtcaaagacccgcttgcgcttatcaagtggcgattgctcactcatcaataatccctgttcttctaagcgccgtaacatcaacgataaactactattggctaagccagtcacttgtgccaattccgtagcagtttgcggatgatgatcccacaatgctgacaaaattttcccctgttcagcgttatagcacgcgcgtggatcagccgttaaataacgattaaaaagtcgggtatttaataagcgaatcttcaaagttaaataaccaccctttttggttttcatcccgtccactcctaaattgtttttatatcagcattaattatatcttactatataaaactaattttagcgagtaaaaaacaccatggtcaaccacggtgtttctaaagaagctgtttcaattgttctgcttggacactgcggacttcttcgactactactagcgcctgcttgtcaatcgttgagaccaccggtacgagcgtcgcgagttgtttggccgtacaaatgacatacagcatcggccggtcattttgactatagtacccttgcgctttaatgatcgtgatgccctggtggaattgcgtcgacaatgtttgggcaatcgttgcatattgatccgaaataatcgtcaccgcgcgttttgccccaaatttagccaataatttattcaaaacgactgctgataaatacaattcaataatcgttaagagcatattttggaagccgataatgaagccggatggaatggcgacaattaaatcaaaaaaaagcatcgcagagccgttttggatccctaaatagcgattggcaatcttcgctaagatcgtactaccagcaatcgtcccttggcaatgaataataatcgccattgcaatccccatcaagacgccaccaattatcgtcggaatgatcgtctgtgtcgtatggtagccgataaaatgcgggagccgcaagaagatagaaatccagagtaccgcccagaccgaataccagatggtttgcttctctaaatacttaaagccgacaatcactaataaaccgtttagaaccaaattcgtagcagctggcggaattgctaacgcatagtagccaatcgccgttaagccagtcacgccaccttcaccaatatgatgaggaatcaggaaatcattaatcgccaccgcataaatcaaggcgccaatgataatcccgagaccatttttaaaaagtgcttttttctgcatcccactcacgtcctcgttcaaactaacataagcgtaccatatttagggtgggagattaaagaacaattgattaactattaatttacaatactctatatttttcctgtgctaagaaaccatttacttactttagaacactctgccagtcattacttgaagcccatccattgtatatacttccacaatgtccctatcaacaatcagcaatacatcatcaacatttcctgtaatttgacgcctttcaattttcgatgttgcccattgacgtctttcaaaatataaccggtcctgatactttttcaagacagcattttgatagatttttattcgcgcgttttataattaagttagccaaatacttttagctaacttgataaaataaaaaacaccaagacaaatctctgttatcattgatgttcctacacaaacaatgaaagaggttattgtcttgatgcaagaacagaataccacagtcagaaaaaaggtcagcacctaacttcgtttgaacgaggcagaattgctacgctgcacagccaaggctattccaatcgtgcaattgccagagcgcttaatgtttgtcatcaaacaatcaataatgaattgtgccgcggcgagatcgaccaagtaaaaaaagtgaatggtcaacgccaatattacgctgtatactcaccagaaacagcacaagctaagtacgaagctaatcgagcccactgtcatcgacctttgaaactcgttactaccattgtaagtgattgctttgggctttttaatttctgttcggattaattatagaatttgccaaaataatacttttttatttctttttgggtgcatatcttgtatgctaactattagttaacgcctttgtattttatgtgatactggggtatgattaacctatgcagagattggagttgaggttgtgaaacttacgaagaaagcctacgtcgcccttggcgtagcagccgttatccttgttggaggttactcggcagtcagtcttcattatcaaaaagcattcttgccacatacgaccgttgccggtgtcaacattagtggccaatcagtcgcagacgctaacacagaactcttaaaaaaagtgaatcgtcaaaaatatacgctaaaggataacaatcaaacattgctaacttttagcggtcaagaagctggctttagccataattttaaaccgttattggaaaagattaaaaaaagccaaaacggttggtcttggctaggccacgtttttgccagtgaacaaacaactaaatcagaagacgcactcattttaaatgccgctgattttgacaaattctcaacggaaaccctcgaaaaggtcaacgctgatcgcaaaccttcagagaatgcccatattaacctcgagaatcatcagttcgatctcgtaaaagaagtctacgggaacacaattgatgccgctaagttcaaaaaagcagttgcccacggtattaaccaaggtcaagcaacaatcgacttaaaaaacgattatgcgcaacctgaagtgaaatctacggacaagcaattgaaaaaaactgccgatcaattgaagacgattgctaatgaaaaaatcagctattcagttaatggtaatgatttccaagttcctaaagaagacatccaaagttggttaacgtataacaacggtacaattagtctagataaagctgccgttaccaaatacgtttatcaattaaaggcaaagtatgatacttttgacaaagatttgaccttcaattctacaaaagaaggcacagtcactgtcccagctggaatttatgggtggagtatctctcctgccgatgaaatccacgccttaatgacagaagtgcctaagggcaaagatttctcaagaacagctgttatccgtggttccggaactgatcagaaaacgcgtagtgtcggttcaacctacatcgaaattgatttaaaagcccaacatatgtggctttatcaagatggtaaggtcacaattgacactgatatcgtttcagcacgtccaccacaagtcaccccaaccggtgtttggagcgtttggaagaaagaacgcaatgccacattgaaggggaagaactttgatggggtcagcgaatacgcaagcccagttaattactggatgccaatcgatgaaactggcgttgggattcatgattcgccatggcaacctaagtacggtggtgactggtataaagaacacggctcacacggctgtatcaataccccacctggcacaatggctaaactctacgatactgttagcgaaggcattccagttgtagtgatttagacgtagtgtactagcaacacctctcctctacggattaaccagaggtagctgacctacagaattcgtttagaaaaagtaagctcaacgattaaatacaaagtaggaataaaattaacttttatccctgcttttttattgcttagatttcacgttctttctcatcgattactaatcaagttttcgctgagtcgaaaaactagttattttaatctgcttggtggtatgctatgattacattagtatatgagagaattttaatctaaggagaaagcctatgctcattaaatccctagttttacctaaagaacgtctcaccacaattgttgaatcggtgaccttagaagaagcattacagctactagaagagtctggttaccgttgtgtgcccgtcctagatgctagcggcaagatcttccgcggtaacatctataagatgcacatctaccgtcataagtctcaagggggcgatatgcagcttcccgtgaccagcttattgaagaatatgaccaagtatattccagttgacgcaccgtttttcaaagtattcttcaacattaaagatttgccatacatcgccgtattagacgaagatagcaatttttacggaattctcacgcatagcacgttattaaatatgctttctgaagcgtggaatctcgaattaagtagctatgtactcactgtgctttcttctggtgaacaaggtgatttggttgccatgtcgaagattatcgctaaatatacctcaatcgccagctgcatcaccttagatgctaagcaagatgaattcgtacgacgcacccttttcaccttgcctgctggacttgatcttgagattttgaaaaagattgtttataagctcgagaaaaaaggctatcgtgttcctgaaatcgatgatttacaatctgataaggcgctccgtgatgactccaaacttgatgatttagtttaacgcaaaaaagggcagtcctaattaggactgccctttttaatctttatgatttcatttgtgcatcaaagtgcacaactttatccacagcatacattactggtgcggtaatcaccatgatgactgcttctgaaagtgccaacgaaatatacgttggccagaatggaatgtgtgtgctagcagtagaaccggttaacacaatcatccacgcaatcatacacatcgaaacggtgaacaagagaatattgaccaccattttttgccaagtttgttttaaatagggcatcacaagcgttaatacaagcagcgccaataaagtttgcccgccaccaaaaagcgtatcgagtaacttgttttcagaactgaaaaagaaattgaacactaataccccaccgaaaacaccccatagatatttcttattgaagaccactaaatggtttaagccttccgaaattctaaattgaatggctcctgaagcaaatcccaacatacctgggaataacgataaaacaacgtataatgctgccactaacccgtttagaatcaccgtttttaatcgactttgattcgtcatctttgaatcctcctagtttttttgcgtgggatggttacgaaccacgttttttcgaacagctaccatcatatcatatttaccggctgttgataaaggtcaaaaaaaagagaacccgcttttataagcgggttctcttcattctttctttttggtatttatgtattaaggatttaagaccgctttaagtccaacactaatggtgagcgcccgatcgacttgtgccatcttatccgccactaaatgtgtgacgcgatctttcaagcgttgtttatcaatcgttcgtacctgttctaataaaatcacggagtcgcgttcgacaccattatccttggccgtaatcccaacgtgtgttggtaatttcggtttttgaatctttgctgtaatcgcggcaacgattacggttggactatggtgattacccacatcattttgaatgattaaaacaggacgcatgcccccttgttctgaaccgaccactggtgataaatccgcataaaaaatatcgccacgctgtattaattctcccacttgttctccctccaattaggatcaatcaactacgcgaatgtgtgcgtacgcctcactttcgcaagcgttaaattcagccgcaatttgactgttgatgctagccatctcagcgtacccgttaatgacgttatctacttttgactgtctggtcgccatgaattcgtgaagcgcatcttgaatcaaatcattctcatcaagggcatacacctcacaatactgcttaattgcttggaccaactcaacgtctaatttaacggatagttgttcacggttagctttcatctgcatcaacctccgaatcaacactttaacctttattcatcctaccacagaactggcgataatcaaattcttaatccttaatgttcatcaattccactgtaaacccgtggtaaccgatcagataaaccacagataatttcatagtgaatcgtccctgcataatctgcgatctcttgtaaagtaatttcgtcatcaccacttttaccaacaaaaactactttggtccccactggatattgcttaggtaaccgaatcatcaattgatccatgcagacccgaccgacaatttcacaccgatgtccatccaccaaaacggttgagccttgcatccgtctagaccaaccatcggcgtaaccgattggaatcgtcccaatccattcagattcactcgcttcataagtcgcaccgtaaccaatcttacttccggcttcaacttgcttaacaaagaccaattctgattcaagacttagcgccggtttcaatgcataaggcaattcaggaatcgcattccctgaaggattcaatccgtacatactaattcccattcgaattaaattctcattgcaagctgagtgccataaactcgtggctgaattcgaaacatgcacaaatcgtggacattctggtaacacggctactagttcattaaaccgggcactttgttctttaaaataagtatcatcgggatcatccgcagttgcgaaatgggtaaaaatcccttctaaatcaaaatatttcgcatgtgctttgataaatgtggctgctgctagtaattcagtcgcatttctaaaaccaattcgccccataccactatccacactcaaatgaatgtgcattggttgtggataaggtatttgttgggcaatttcgtaagcagcttgcaaccattcgagtgatccgaccgtaatggagatttggttggcaatcaccaattcgatttcggtgggctgtgtaatccctagcaccaaaatgggttccgtaaagttagcacgccgtaaagctaaggcctcatctaaaatagccacacaaaatcctgcagcaccagccgcttgggccgcttctgcaacaggaatcatgccatgcccataagcatttgcttttaagacagggaaaatcactgcatctgtgccttttaaatcctttagttcattttgaatattttcataaattgcgttttgatcaactagaatgcgtgttggtcgtaagtagccgactgtcatcgtctcaacctctttccaaaataacttctgccatcactaacgtcgttgtatgcgaaagtgatacgtgaacagttccctcaaataaatcttgtttgatgtagggtttgccctttgcatcatttaacgtttcaatcgcttgcagttgtacctgtccaataccagtcccataagctttactaaaagcttccttcactgcaaagcgccccgctaaaaattctaacgcacggcgccccgtataccgtttaaacagttcatattccttagctgttaatactttttcagcaaaatgactattcttactctgtgctttttcaaatcgatcaatttcggctaaatcaatgcctaatccagcaatcatcgtcttcgcccctagtaccctatttttaattagtttaccacaaaaaagacagagactgaacttacatctctgtcacaattgactatatgaaaacagcggccgaccaagttggccgcccgctgtttttaaaaagtcttatttatcgtttgtacgaattgtgaagttccgttttgaacggccatcagtcttcttacggttgtcacgattgtcattgctacgacgtttgctgctatcgccgttgccactgttgcgacgaccgtctttgttgtcattaccacgacgtttgccatcgccattaccacgacgattgccaccgcgatagccgccgccgttaccgccacgacgattgccgccgccattccggttgccgctacgattgccaccttttttacgtgaaggcaatggacgttctggtgttatcttaacaggaactgattccttgctgattgtcttcaaaagcactgaagctaattcaacgtcagagaattgtttcaataattcttcagcttcttcgctgaatttagccaattggcctttttcaatcattgagttgatgtctgcaaccgctgcagccaattggcccttgaaggcttctttttctgtaggtggttgtaatggtaacatccgtttcttcgttaagttttcgatgatgtgtaagtattccatttcgtttggtgttacaaaagtaactgaaacgcctgacttaccggcacgacctgtccggccaatccggtgaacataactatcaggatcttgaggaatatcgtagttataaacatgggtcacacctgagatatcaagaccacgagcagcaacgtctgttgccactaagatatctaaacggccagccttaaatgatttcaagacgctcatccgtttttgttgtgataaatcaccgtgaatcccttcagcattgtaaccacgagccttcaaaccgcgtgttaattcatcaacacgccgttttgtccgaccaaagattaatgttaattcaggtgattgaacatcgaataaacgcgtcataatgtcgaatttttcgaagtcctttgcccgcacatagtattgatcaattaagtcagccgttaattcttttgacttcactttgatcatttcagggttagtcatgaagctcttaccgattttcatgattggtgctggtaatgttgctgagaataaaagtgtttgacgttggtctggcacttgtttgatgatgctttcgatatcatcaacgaagcccatgtctaacatttcgtcagcttcatctaagaccaatgttttcacgtggtctaatttaactgtgcgacggttgatatgatccaataaacgacccggtgtcccaacaagaatttgtgggtgatcttttaatgagcggatttggcgacgaatgtcagccccaccgtatacaacttgtactttcgctttacggtcgcgacctaagcgatagagttcttcttgtgtttggattgccaattcacgcgttggtgaaatgatcaatgcttgaatgttaggattgtctaagtctaagttttgtaagattggtaaaccaaaagcggctgtcttaccggtaccagtttgtgcttgaccgataacatccttaccagctaatgccaatgggattgtttcgccttggatgggtgttgcttcttcaaagccagcgcgttcgatggctttcataattggttctgataaacctaattctgcgaatttcaaatagtgttcctccttgttttgtaaaaaacatgccattacaaaacaggtccacttcgtcaattgcaccattttcaaaaatctgtcttgtaatataattgttttcaaaagcctttttcattaaaaaagctccttaatagcttatcatgccacaacttaattagcaaacggaattactccaattgttaatctaattccatagcttcaatcgctaaacagcgtgcctgtgcagttgtctgtcaattgctaatcattaattaacttcagtatcttgtaaagcagcgactactttttctaaatgtaagccatgacttgcctttaaaacgattaaatcgtcaggttgtacctgcgcttgcaagccagcaattaattgcgtttgttcatggcggttaaagtaatggaggcgttctggtgcataacgctcttttaacgtcacatataatggttcaatttcatccccgaacaagaagacctcttgaatcatcgtgggatctaattcttgggccaaactttcgtgtaatttcttgctggcagtaccaagttccaacatgtcgcctaagacggcaatccgccgcccgtcagtctcaaaatggctgaaattgtgtaaaacttctttggcagccgttgggtttgaattgtaaacatcactcaacatccgttcacccttttgaccaacaagccactctgtccgattacttgtgacttcaaaattcgccaaggcttttttcattaattctggtttaatatggaaccgttgcccaaccaaaattgcggccaacgcattattgacattataagcacccatcattggaatcgtaaacgtcatctctggccaagcattcaacttgaatgacgtttcagtttcacctgcacggacttgtaagggatataagtcattggtcgtcaaattaccgaatgtctcggttgtgagttcgccaacccgttcagtcaatagcggttcgtcgccagcgtaaattaatagaccatcttctttgagcccatctgtgatttccatcttagcatcggcaatcttatcacgcgtcttgaaaaattcgatatgggcttccccgatcatcgtaatgactgcgacatctggcatggctaattcactgagcgcttttaattgacctgggcgatccatccccatctcaatcactaaaatttcagtattagcttccatcgataaaatcgtttgtggcacaccaatttcattattaaagttagcttgtgtcttgtgcatattgtactgactacctaaaacagcagctgtcatatctttcgtcgttgttttaccattactaccggtaatcgcaaccactttgggattaattttttggagataatgcatggctaacttctgataagccgctagtgggtctgtaaccactaatacaggaaaatcagttggctgtgcatcatgattggcagcccaaaaagttgccactgccccattttccttagcttgtccaacaaagtcgtgaccatcacgcataccagctaacggtacaaacaaagcgcccgcatttaattgacgtgcgtcaaacgcaacattcgtcacttcaatggttgcccattgttcaatatcgtttttagccccagtgactcgtgcaatttcacccaactgcattttcatatctcaataactcctattactctgtgtgcatttttacgcacgctttttttagttatggcttaaaatactacgcaatattgtaccatagtttcaaaaaagccccaaaaatgattgaccaccaattaagagtaccactgtgaatagtcatcaacctgtttatcatttggtcgatattgttgcttagtcggactccgccaccctttaaaagctgttttgcgtagtgcatgatcattttgcagcggtggttggctatctaaccgggcgtgttgccgatcattccgattagcataattaaacgattcaccgtttagtagttgccggagtgtgccatcatctagctggtaatggtcaggattactatcaatcagaccatcagcctttaatttaagcacttgccattgactgataaatgctccagatggtgctagaataaattcactatgaaaatccggcgtgagtcgttttcgattccaatgcgttgttgggcgctgtccgttgcggtatttattatggagccgagctggttcacgccgcagccaataatgtggctgggtcgcttgtcgttttcgcacaaaccgcgctaaggcttgttcatctgtttcaccagagtgttgaaaataatggcggatatagcgtagattctgccgatctaaatacattctgaattgatgaatccgtttatcggttaaaactcgaccgacaaatgcacgttgcacactttgcgcaaaggttgctaaaaaaggcgcatctggtgctaattgcgggtcaagttgataatcacgtgctgttaattgcaaaaacgcatgctcatccaactgcgcccctaaatgcgtgagcactaaattgatccgctggtaattaattactggttgtgcagttcggtccccgtatgcttcaaaaagcatttgataaagtgctgagcctacttgatgtaatgcttgccaattgtgttgcaaaatccttttaagcgctgttggttgcgcagcaagttgtcccgttaaatggattgcataagcgcgtaaactcgcaacgtcccaattagcgcgttctaactgttcaaaatgggccaccacctctgcctgatcaacaatccgataccgctgcggtagtgtttgccgccaaagatccattaattgagtgccatccgttttagttgccagcgttgtgatgatggcgcgttgaatcattgtgcgttgttgcgtcgataatgttagctggtgacgcgcatgcaatgccaataataattgcccacgcacaaccggtaaatcaatcatggtaatctgtttgctcggtgtctcattcaattgcattattagagtagattgtaacgccattaactgctggattggggataatcgcacactgatcactcctcttttcctttattatacaaaaaaagagagggacaaaaatgaattttgcctccctctatataaaacgtgttctatcaactattacctacagctgatgcgttatgtctttaaaacattacatcgctcttaatttagcgactcgttcttcaatcggtggatgactatcaaataaatgagcacccgaccgactaagtcctttaaatggatctgagatatacaaagctgcgcttgatggatccgcagcttgcattggctcactgtcagaaatctttaataacgcattgatcaaaccttgtgggttccgcgttaattcgacaccagatgcatcagccaagtattcccgatttcgcgacaacgccatctgtgcaatactagccgccaaaggtcccaatatcaacaataggatcgaaaaaaccaaaccgatgatattacttgcaccttcttcacggtcgttatcacgactgcggccgccgccccaccataacatgttgctgccgatgttcacgagcattgaaatcaccgcagaaagtgccaaggcaatcgtttgtaaccgaatatcgtaattgcgaatatgggagacttcgtgagcaattaccccctcgagttcctcccgattcaaacgcgccatgatgccagtcgtgaccgccaccgcagcgtgttgtggatcattgcctgttgcaaacgcgtttgggctaggatcgtcaacaatgaaaacccggggtatcggtacttgggcgaccatcgccatgtcttcaacaatgtgccataaatcaggatattcgctagcatcatggacttcggtcgcatgattcatctgcataacaacgttggttgagtttccaatcatcatcgccatataaacggcggctaaaatagccgccaccacgacaccactaatcaaattacgcataaacagataccctaatgcagccccaattgccaatactaaagcaaaaaagccaatcatcacatataccgttttacgtttgttctgttgaatttgttcaaataacattcccaatcacaccctattcaaaggaaactttaggtgctgctttttcctcaactggcgtttctaagtaagctgtcttttggaaattgtgagcacctgccaaaatattaccagggaaagtttgaatttggttgttgtaacgggtagcacttgagttaaacaattgacgtgcatacgcaattttattttccgtattcgtcaattcttccattaacttcgtaaattctgcgtccgcttttaaatctggatagctttctgacaaggcgaaaacgcttttcaatgaatccgttaattgattagaagccgccattgttgcttgccgattatcagctggcatttcaaccaattgattccgcatcttgatgactttttccaacgtgtcttgttcatgcttagcataacctttcacggtcgatactaagtttggaatcaagtcattccgccgtttgagttgtacatcgatttggctccatgcttcatctgtccagttccgactcttgaccatgttattgtaggtgctgatatagaagccaaccgcgccaaccactaacaaaataatgataataataaaccacaacatacgcgtatcctcttttctttaatgttgtcttcatattatcagactcgctacaacaaataaagaataggttgccaaccttaacaaaacctttgtttgacataaatggtaaaattaaagagttaccaattttgggagggatacttgcatgtttactgcacagccagcaattgcgaatgttgatttaactgcaccacggatgattgtcgatgaccctcggattcccatgagttatcaggcactttgtcaaacaaccaatggcggttttttgactaactttagccttcctacgagtgagccaacaagtgatggtctcgccgacgttgagtgtcattatttagctgggattgctcacaacggtgaagcagtcatccaagcccccgacttgcccgattacttagtcccttttagtcagcatcaacagcagtactttgtatttgattgccaacaagcctcagctgaaccaccgattcgctacatagatactgaggtcgatcaatggttaaccgttgctgatttgctggatagttttctcgaacaattaggtcccaaagtaattgatctaaatccagataatgagttaacccctttgcagcgtaaccattacttgttagtggcacagggagcacagctagacactttgctagcccgttatgaagccgatgctgataaagaatggctgtttgattggctactctattttgccgaacacggtataccagcccaacaagcaagcgcattgactgcctacgacactcagcggttgtactttaaacgccagctgccacgagctaaagatgcgcaactgactgccctctttgaacaactcccacacttaaaagacgcctaccacgcacatcagcaagcgtggtcgccgctttaactttttagaatcgagatgatgacaccatgttgactaacattcgtcaacgtttattcagacgccgcgcacaatgggaacagaacctcgtcgttttatggtttggtaatttcatggccggggttgcttttagtttgattatgccatttatgtcgttatacattgacacacttggcaactttacaacggcccaactgagtttatggagtggggtgacctattctattaccttcttggttaccgctctgatttcaccatggtggggcaaaattgctgaccgccgtggtcgcaaattaatgttactccgcgcctcattaggactagcgattgtcctgggtgcgatgggcttagtccaaaatatttatgaattaattggtttgcgactattacaaggcttcttctcgggttatatcagtaattcaaacgccttaattgccacttcagcaccacaagaaaaaagtggtcaagctttaggcaccctgaccaccggaagtgtttccggaaccttattaggcccgttgttgggtgggattatcgcccaagcaaccggctatcgaacaaccttcttcattaccggtaccatcttgttcatcgtctttatcctctgtctggttttcgttcacgaagacttcacgccagtagaaaaaggcgatcaagtacccggtcggcaactgattcatgaattgaaatacccgcatttaattatcggcatgttcgtcaccacaatgattattcaagcctccaacaactcaattagcccgctgttgagtttatatgtccgtcaattaatgcatcatggcaataacgtagcgttagtcagcggagttgtcgcggctactccagggatcgcaaccttaattgccgcgccgcgttttggtgcacttggcgatcggatcggttccgagaaaattttactcggtggcttgatcttcgccgtcttcgtttacgttccgcaagctttcgttcaaaatgtttggcaactcggtgccctgcgtctgctggttggggtcgccgatgccgcattgttaccgcaagttcaaacgattcttgcgaagtactcaccccatagttccgccgggcggattttcagttataaccaatccttccaagcaatggggaatgtcgccggacctttaattggttccagcgtttctggcctattcggttacagcggggttttcctatcgacaaccgttttagtaatcgtcaacctcttctgggtgcgtcagaatacaaaagtcttacgcgaagaacatgaaatacaaaaataatacaaaaaagtggtgtcgctcattttcagagcgacaccacttttttgttgaaacgtgctttttgtggcatatttctgcgcttaacagaatttgccaaatcggtgattacaatcgccaattcgtcaaatccagttaatgctcaaaatataagcgccacaaacgcactctattttttggtaaacgtcagtttatctaaccagtcccggttatgtttaatacagaaatagccgataatggcgattaaacatgatcccaagacatccgctagtaagtcccccatcgtgtctaacaaggctgcttggcctaataaaaggtgaccttttgccatataacgttgcatgtttaagcctaacaaactatcgccggtaaattcatagaattcccacaacacaccaatcgtactcccaaacgtggccgcaaacaaactcatgagtaaggctgaaatggtttgacggagttgttttgaaatcaatacgttaaagaccgtataccctaagcccgccaataacccggcactcaagacatgcaagaatttatcccagtagtataagcgactataaaaatgtaatcccgtccccaataaaatcgaacagtatacaaagattaaataaactgcatatagaatctctggaaaccggtatggcataaagcgttcaatgataataggtaaggtcgcaatcaccaggcctgcaaccacttgtaaaacggcaaaagacaatgttccgttgtctttggggttagtcagcatttgttctaagtaataaccaatatagattaattgactcacaatggtgaagacataaagccaatctacccaccgccaatttgttttttgttttgccatgttattcatcctttccattcaaatgatacagcgtgacactccgactaagtcgcaagtatgcgatgaaatgaaagatattgcccagcaaaatcaacagtgcccctagccagctattaatctgaattccgacaatggcaatggcgtaaatcaagacacttcgtaagggatcatttttaatcgtttgataaaattcctcgtgtcgctgttcatactgacgcattagttcatgatgcagtgccatataccgatataatacccaaaacaaagctgagatgactaatgcaacaatcgcatacgatgtaaaagcaaatcgaatatcagcgccattttgttgagcaatcgattccgacaacaaactagttgggtaattaatcagtgtcactgcaaataaaatactgagattgatcacgtttaactgccagttagcttgttttattttcgcaaaataatcgtgatgaaacaaccataatgtccccacataaaaaaaggatagtacataggcagccaaagttggccactgtgcaatcaccgcttgactcaaatgccctgcttgatagtccggcactttaaagtctaacactaatagtgttaataaaatggcaaaaacgccatcgctaaatgcttgtaatcgatcgattttcattattctttcccggccgaaaggtttaaccttttttgttaccatcagttttttccaagagagagtagtgattaacctgcagctattagctaatgagatacttagtgttactcaggatgtttacgtggcctataaagaaccctactagctgtgagtaggattaagctaagtaaaatataatatagcgcatcgtaattaaaaagccgtttaacagtcccttatgggatggttaaacggctttttgctatgctaaggcgtcattttctgtttcctgataacgttgcaagatgtagattgctaggataactagaattgcaccactcatttctacccaactaaagcgggcatggaagaagatgatacttagaataaatgtaattacaggttgtacggcatcaacgatactgattacggttgatggtgcaaagtttaaactgtgtaacaagcaaagatatgcgaatacagttccaatcaaaataacggctaaaattgcgataataccggaagcatttaaacgcggcggtgcttgccagaatggtcggtggatattgaagagtaaaccactgatgaacatgccccaacctaaaacgagaattggtgatttttcattaacgattggtcttggtagcacaacgtagaaagcagctgttacaccggataagattccccagattaatgaattaaaaggaattgttaaagtatggatattgcctttcgtaatagaaaggaaaacgccaattaaagcaattccgaatgagataatatcaattcgatttggccacttacgtaagaaagcgagggttccaataacgataaacagaggacttagatattgtaaaatagtcgccgctgctgcattccccgtttggatactcatgaagaaagtatattgattacccatgataccgaaaagggcgtaagcgattagccaagccgttaatcgttttgatttaaaaatggagaagatatcttgtttgaacttaattgccccgataagtaataaaattaaaccagcgccaagcgttctaacggataggaaccaagttgcagggatcttttgtccttgcgagatgaattccaaaatagtacctgaaacgccccagagtgcggacgccatagtcgcccaaaacatgcctttggcgatgttttgcggttgagttcgattgttcattgtgcgccatccttttttgaaaatttataactatactattataagctaaatggcgtatttatgctatttgcaaaacttttttcattattattccccacaaaataataaatatgtcagtgataaagcgaactggtcaacaaaagctaattaagttatgatgaataaaaaagtgagggattcagatgcaatacattgcgttattacggggaattaatgtgggtggtaaacggccagttaaaatgagcgtgcttaaaactgcgtatgaagcggctgggttcaccaatgtgaaacatacatcaatagtggcaacgtgttatttgaagccccagaaacaggcttaacaaccttagcggcaacttgtgatcagattatggtggagacctttggcttttctgtgaatatcgccgtggtcacagctgaccagttgattcaagctgttgcggacgcaccaacttggtggggcaatatgccagatgtgaaacataatttaatcgtggcgattgcgcctaaaacgggggcggaattgagtgtacatgtaggggcaattaagccagcgtatgaaaaagttgccgtgaatggtccgtttattttctggagtgcacccgtgaaaacattcggtcggacgcggtggtcgactgttgctaaaggggacctataccagtggctgacaattcggaatgccaacaccgctcgtaaattagtggcactcgcacaggcactacgggaagcatgaagtggttagactcgcatcttcattaatattcatatatacttatagtaataatcaataaagaaatgagggacgcgatgcgcttatccaatttgaaacagacgattatccagatggggttgatcttgattgctctcgaaattattgcgattgggattcaactcttctttgccccccatgaagtagcagccggtggggcaaccggtgtggggatcttattagaagaattgatggggtggaagatatcaacagtggtgtttgtgattaacatcggcatgctgatacttgcttacttcttacttgataagaaaaccacgttaagaattctctttggtagttttatgctaccagtttgtttagctttaacgccccaaatgatggtggtggaagacaaactattagcaattattatcgggagtgttgtttacgctgccggaattgccttgttatatcgaattgatgcctcgagtggtggctcaacagtgccaccgttaattttcaaaaaatatttcaatatcaaaccggcattgagtttgctggtagttgatttactagtctgctttgcgaatgtgttcgtctctggttttgagacgttcatgctggcaacttgttcatcaattctgacgttgattacgatgaactatattgagaccgggttgaaccggaaaaaggtcctctatgtcatgagtaacgaccaattacctgaaattaaagcccatttaatcgaagaatctgatgtgggcgtgacgatttttgatgttactgggggctattctaatgacaataagcagatgttgatgctcgttgttgaaaatcaagcctatcaacacattattaatcgaattcatgaagttgatcctttggcatttacgattgtggctaacgtagccgaggtacgcggcggtagtttataaatttaaaaagggtcgagacaattgtctcgacccttttgtgtgttattgatgattaaagtagcgatcagcttttaaattattgatggtgagcatgataatcaagctgatgatatagagtgttgaaatgaagagcatcacggtcatcaccgaataatgatcaagtaaccaaccgataatcacgctcgaaaatccaccgatacagcggccaacgttcataatcacgttattggcggttgcacggacttcggatgggtagaggcgactgacaatcgcgccatagcctgcaaacataccatttgagaagtagccgacaattgcaccgacgaacaataaagcacccatgctattggggaaggttaagatgtaaacgcctgctgctgaagcaatcaggaataagacaaaagcaaaccgtggaccaattcggtctagaatccaaccgaaagtcaacatgcctgctgacatcccggcaatcgtcgctaacatccaagttgatgaaccagccacactgaggtgcatttgttgttgcatgatggttggtaaccagttcattaaaccgaagtaaccagcgatttggacgattgccattatcatcagcgcaactgtttggtaagctagttcgcgtgttttaaaaagagcgctaatctgaccttttggttgatctgattcagaagtgaacgttgtactttcgactagatgatggcggataaaaaaagtaatgataacaggtaataggccgaatagaaatagtgcatgccaaccaaattgtggtaagacccacgctgctagaagtgccgcggcaatagcgccaagttgacctgcgacacccacgaaggatgaaacacgtccgagctgtttcttagggaaagattcggctaagaccgtcatgccaatcccatattcgccaccagcaccgatcccagctaagaagcgacagagataaatcatgggaagggtgtgggcaaatgacatagccgctgtcgcaaaagcaaagataaaaatggtgtaagtgaatgttttaatccgtccaacgcggtcggctaaaacgccaaaaaaaacgccacctaacaacattccaatattggtaatcgttgcgattaatcccgcctgtgttccactgagatgtaaatctgcaatgatggacgatagggtgaaagacaagaacataacgtccatgttttcgagaccgaagccggccgttgttgaggcgaccaccttagtctggtagcttgttaatcgatgttggctgtgtgccgtaatagttttcatattcagttttcctccaaaaaggacgctctctgtcgtcccttattttgcttggtgccaatcttagcacaggaaagtagtctgtgcaagggtgttatggaaaaagcgcaagcgtcctttgtgatataattgagtttataaaatggctcttcagcgatggagggcgtcatggaggctattgaatgactgataagaaaaaacactttacttttccgagcgcctacacagtaattctacttgttttactggcagtgatgatcttgacgtactttatgccagccggaaaatatgcgagtttacaatataacacgacccaggaaaacttcactgtggtcgcacccaatgggcatgaatcgacagcacctgggacacaagcaacactgaagaaataccacgttaatacggatttagcgaagtttaaggatgggtcggtgtataaaccagttgcgattccaaatacatatcaaaaactcaatcagcataaaccaaacttatttggcgcgattaaacaatttctgaatgcgcccattcaagggttatctgaaacaatcgatattatcacatttgtcttaattctaggtgggattgtgggcgttgtgaataagaccggtgcatttgcggccggaatggcggcgctatcgaaacgtttgaaaggtaaagaagcctggttaatcgtgattgtaacgagcttgattgccctaggcgggaccacctttggcttggctgaagaaacaattgctttctatccaattctagtgccaatctttatggcagctggctacgatgcgctagtcgcaattgcggcgatttatctaggcagttcaatcgggacaatggcttcaacggtgaacccattttccgtcgtgattgcttctaatacggctggcattagctttacagatggtatgggactaaggcttgtaatgctgattctaggcacattaatctgtattttctacacgattcggtatgctgaaaaagtaaaacaggatccaagccaatcgctcatttataatcaaaaagcagaattggaaaaacatttcctgggaaatagtgatgtcaatgaagtaccacggtttgatttccggaagaaattgatgttaattatttttgcggccggttttgtcatcatggtcttcggcgtgaaggaatggggttggctatttaatgaaatttcctcgttattcttagcgattacgtttattttggcgtttatttccggactatcggaaaaagattttgttagtgaattcgttgcaggggcttccgacctgttaggtgtagcccttgtgattgctttagcacgcggcgtgacgattattatggaacaggcacaaattagtgatacgctattgtactggttaagtagtggcgtttcccatatgagtggtgttatcttctcaacggtgatgttcttcgttttcattctactaggattcttcattccgtcgagttccggtctagcggtgctatcaatgcccgtcatggcaccgttggctgatgtagtcggtgttaatcgtgacgttattattagtgcttataactggggacaaggcattatgtcgtttatcacaccaactggtttggtcttggcctcgctggcaatggtccatgtaacgtttgataagtggttaaaattcgtttggccattaatggcgattattggtctattagcaattattttactcggtgttagtgtctatctttaaaaaaacggtcaaaaaaggtccgccacaatcgtggtggaccttttttcgtgattagtaaactttaaatttcgttactggccagtagcggagtttgacaacgccttgaatcccgttgaaggttttagaatcatcactgacaaagcctacttcttcataccggctatcctttgaaacagtccggttatcacccatgacgaagtagtggtgggcagggactgtggaacgaccaagcacgtcctttaaatcaaagtttggcttattagtctttgggttgagtgtgaagtagtttgacccggctaggaaggttgttggatcttttttatagtcatttaaataaggctcactgacttttttattattaatatagagttgatccttgttgaagcgaacagtttcaccgggcatgccgacaattcgtttaatgtagaattcacctggtgaatcaggggccttgacgataacgacgtcgccgcgtttcagtttcgtatggcgtagtgcaatgacccgatcatactgtgtaaagttgggttgcattgatggcccgaaaatttgttcattggcaatgacgaatttgagcagtaattgcgcaatgccgaccatcacggccgctaataaaatgatttgtatagtggatttccaaaattcttttgctttagctgacatatcgcacatccttagaattcaatagattcattgtactacaattaattggtagatgacaacgaaaccgtacagttccttaactatttaaatgatcttttaaattagggaaatgacgcgttatttatcacgggaaacggttcgtggtatactgaaagggattattttaaacgacaggaaaagtgagtttaacgcatggcgaatttagtaattgtacgacatggcgagagtttagccaatcaattaaatacttacactggttggtctgatgtgccattaacggctgctgggcgcaaacaagcacagcatgtgggccgacaaattcaagcaaccggaattcaattcagtcatgtgcatacttcgttattgaagcgtgcaattttgacgagttacattattctggatgaaatagaccaattggccattccaatgacgaagagttggcgattaaatgagcgccattatggggcattgcgcgggttaaataaggaaaagacgcgggctatttttggtgcgcatcaagttgcccgctggcggcgtagttacacggcggtcccacctttattgacgactttttcgcaggcccgtcgttatcgactagttccaccgatgagtcggccacgcggggagagtcttgcacaggcaacgcaacggctattaccttattggcaagatcaagtagtgccaggattacttgcaggccaggaccaattgattgtagcgcatggttctactttgcgtgcgctcattaaggtgatcgaacagatttcagatcgcgatattgatggtgtggaagttgaaaatggtgaagcactgtattatcgattcgatgctcaaatggtagtcattgagaagggacgattagcggactaagcggatggacaacaaattgaaaagaggactgctgttggtagggctcatcctactaattattggcggcacgatttatcatgaacggcaaaaatatgccgtccaaactcaacaaacccaacaaaaaatgaaacaacttcagcaacaattacaggcaacaaaacttgagttagccattcaaaaggcaaaaagtcatgaagccgggattgatgatcgaaccatcaatcatttgagtgcgaaggaacaacaatttgtacagcagttgctacatgataacagttttagcgggaccattttaattgtgcggcggaatcatgtgttatttcaaggtggccggggctatgcaaattttgcgactaagcaactgaattctccacagacgacgtatcagattgcatcgattcaaaagtcattaacggctgcgttattgatgaaacaggtgcaagccgggaacatcgatttagcgacaccgttaagtcggtattacccgcagattaaagaggcggatcaaattacgctgaagatgatggttgatatgcgttctggactgactgaattatctgcaccagaaaaagaattatcagatcaagcgcggattcaatatgcgcttgatcatttggctgttaaagatattggtcagcataattattcgccagttaattaccttcttttggccgggattttagaacaagtcacccataagagttatcgagagttagttggaaatcagttgataataccgtttaaattaacatcgtttaattttatgccaaatgaaacgaccggccaacaagcgactgcttatggctatcaacaagacggctatggcacgccagttagtgaaccaagttacgtatatatgcgtgagttagggaccggaaatatgtatgccacaacgagtagcctctttcgaactgaacaggcgattgttcaaggaaaagtttttaaaaaatcgttattaaaaacgctccgctcatcgactactggtgaatatacgggtggtgtttataattacaaagattattttacaagccatggggtcgaatctggattcgaatctagcttgcagatgagtcatgatgggcgttcaggagttgtcttattatcgaatcaatataaggccaatccttcaattggacttctaacgaatcaattttataagcagttaattacgcttaatcgttaaaaaagcagcttggcttaatgcctagctgctttttgtttggactgtaaaatgatgttgtgcaagtgtccaaaggccaaacccaattaaacagccaatccagtttaagaggatgtcactgagtgcgaaagtccctagataaaaggcgaattggagaatctcaatgcctagaatcgttaagggcgctatgatgtttgtttcaacaaatgaggctttcaaatggtataaaccgcctaatgggatgaaataaacgacattcagtgcggcttcgagcagtgttttgtgatccttttgaatgaaatcgaacgggttcaagctaactgcatgatagacgtttgctttggtgaataagacaatgaataacaagagcagatagacactgtagacgagatagccatagattggcgatagttgtcggcggtcccattgcacccagcccaaccaaaatgtaagggttaaaaatagaatcagaaaaagcgtcgttgctggaaaacgggccataacccgggttaagcgtggataactgttgagtgttggtaagacaatgtgccacacgaagtagcgacttatgaggtaggcgaccacactggctaaaccatattcaagtatcttgcgcattacggttcctccagtgattatagtttggtttgggcgaggcgtttagtgaattcagccataaagtcaaaatgttgtgtgtcggctaacgtatcttctaatttatttagaagttcgttgagcgcttgttgttcgtcgggggttaggctaccgaataaagtctccgtaaattcattgcgaccatcgagggcttcttttaaaaccgctcgaccggccgctgtaatgaagacgtgggtgattcgccgatcatgatgatcgggccgccgattaatgtagtgtttagactctaatttgtgcaagcattcggttagggatgaaggccgaatatcgagactttcggcgagggctccctgcatttgtccgttttcgatattaaggcgttttagaatgcgaatttggctgactgagcgatgatcggatgaaaattgcatgccataataatggcgataatggtgaatcaccttattgaaagtttggaaaagctcgttagatagctcggtcatggggactccttaataaagtttaatttgagatgctaatacgggtataatacgtcatttcataaggtggagcaatattgctcaggttttatcaagagtgttgtgaataattttacataataaccgcaaaaaaaacgatggttaaactgagtcagttctaaccatcgttttggggttgttattgagctgcctttaagaaatttaatgcagctgcataatctggttcgtctgtttgttcgataattaattcggtgtagctaattgtaccatctgcttccaaaataaagattgagcgttgaagcgtgttgttgcttggaacgtagagttgcattgctttcccgaaactgagtgcctcatcagaaaggagttgcatgttcttaacgccttctgcagcgcaccagttattttgttgttcgatggtgtttgttgaaattgtgtagaaatggacgtcttcgaattgatcgacggcttggttaaaatgctttgtttgaatgctgcaaacacgggtgttaatgtctggcacgacgctaattaaagtccgtttaccgagcaattgcgcagaagtcaccgtttcgccagcggcatttttaaggtcaaattggggtaactgtgtgccgacggctggtggtgtgccgattgtatcgagtggttgatcatgtcttgtgatttgcatttgcataaacctcatttcataataaaagatgcttttattctaagctgattgtgctgagaacacaattaatcacgctcgaggagtatagaaaatgttacgtaaaaaaattcaagccttatacgctaaaaagatgctgaaccaaattatcaaagaggtcaatgtcaaaccgctcgtttatgaaattgtcgatgcaagtgggactgaaaccgcggttttgctaagtcatgagcaatgggttaaaatccaagccgcgttaaccgctaacaagtagcgtgaattcccgatttagacttaatacggtaactaagctgtaacatttctgtaatagttgaatgttacacttgttcttggttggaaaaccgtacataagttaagtatttttaaaaatgataaaggggaatcattcagtgaaaaaagtcagtcgattaatgttcagtgcactagcattcttaacaattgggtcaacaatggcggttagcattggtgcagtcagtgccgatgaagttgctgatacaaaagcatcaatgacaaaccttagtgctgaaaactcggctttattagctaagttaagtgctgcacaagataaggttgcttcaatcgatagccaagtgtcaaataagaccgttgcaattgatgatgcacaaaagaacattgcatcaacggacaaagaaattactgaagtggctcaaaaaatcgttaaagttcaagctgaagtccaatctagaaaagctgttttaaaagaacaagtaattgcgcttcaaaaacgtgctggggatagtgtttctggaaatgtttacgttgacttcatcgtcaatagtgatagtttctcagatatggtcagtcgtgcttcagttgttggcaagttaaaccaagctaacaaggaagcaatggacgccgtagcgaactcagaaagtaaattagctactttaaaacaagaacaagtgactaaaaaagcaaacttagttaacacaaaagcacagttagaaaaagatcaagcacagttaacatcacttaaagcagatgcagaaaatgaacaagcaagtttccaacaagaagtggatggacataagacacagcttgctagcttacaaagtcaattagatgctcaaacagcagccgctgttgaagctgctaaaaaagaaactgaaaaagcaacaatcgcaccaacggttgcacctaaaacaggttcagacaatacaccagcaccaacgcctgcaaaaacaacgacagttgcgccatctggtgcaaacactggttcattagttggcaatgccttacaattcattggcacaccgtatgcatggggtggcgcacaacctggtggttttgattgttctggtttagtttggtacgctgctaagatggccggcattagcttaccacggacatcacaagaacaaagcacggttgggacaaaagtgtcattatcagaattacaacctggtgaccttgttttctggggtggcgttggttcagcacatcacgttgggatctatatcggtggtggctcatacgttcacgcaccaacagaaggccaaaatgtaacaacgatgtcaatgcaatattacaaacctgactttggtcgtcgtttataagattaaataaaagaataaaaaagtttggcgtctgcttaaattaagccgccaaacttttttatttatttaaatcctgaatagaagagtgtgaatgaatagtgacaaaacaactattagtcattacgggcgccacgggtagtggcaaaacaacggtgagccattatttaaaagaggcctttcaaattccacaagtggttacccataccacgcggcctagacggcataatgaagtcgacggggtggattattattttgaaacaccagacaccttggcacaaaagcacctcgttgaatcggtgagctattctggctatcaatatggctcttcacatgaagcgttagatttggcgtggcaaaaagcacagctgattagcctagttgttgataccaaaggggcacagacttatttagagacgttccccgaagaagcatcggtcttgttcttaacggtttctgaaacagatgcgttgattacgcgccttgaaaaacggaaggatagtcctgaagcaattcaaaaacggattcaaagtgctgaatttaagcgggatctgatgttaccgagtcatttaaatcaacgggcaactgtgttggttaacgatgactgggaaacaactaagcaagccttagcaacattaatcgcaaccctaaaaaattgatcattgaaaataaaaaggaagcctgtcgaacgcgttcgacaggcttccttttaacgtatggttaacccttatgcaaataagtgttggttaaccgaattggtttgtttcactttataactgagtttttgtacggcttgttcaattgtaataccacttgcgctgattttttcattgttcgttgcagttgcgataaatttttgagtttgcgtatcaagtgaaacatgataccaattattagtttgactagtaaattccatcgtaaaatctcccttcaaatgactataaatactgatagaaggctaatgaagacgatttcttaaaaatcatctgaattacatcataacgcgcagcctgagataatgcaactattttgtattcggattcattaaaatttggtgaaatttagttgtgcttagctaacggttatgggattaagggtataatggtaaatagtgtggggtaacaactaaattgaagttggtagtaacaagcgccagcgcctgacaacctagaaagcatgtgctagaatggcgtatcgattaatcgagaggagcggatgtattaaatgagcgaaataaccactgccattgccgtattacgcgcaaatgggtacaaaattaccaagcaacgccgagagatgctacagtatttatcgggatatgaaaatcgctacattcccgtgactcaaatcgacgagcatatgcgcgccatttttccgggaatgagtcacaatacgatttatcgcaacattaaagattttgaacaacttggcttagtagaacaacaaacagagggtgaacaggcccacgttaaatatcaatgcgattttgaacatcgccaccatcatcactttatttgccgccagtgtggcaaagtgattgaattgaaaatgtgtccgttagatttttttagtcagcaaattccaaattgtcaaattgaaggtcatcagttcgaactctatggcctctgtgaagactgccaagcataatagaaagggagcgttaaaatggcatatcacacaccacccattattccaccagccgccattatttcgttaattatcgcaatgagtgcgaccaacattgtggcaaatacggttaaacctgttgaaaacaccaagacagagcagtcgtcatttgtttcaagtagtagtgcaaccacaggttcaaccagcagcatgaatacatcagaaccagaatctgagtctgaatcggaatcctcatcgacctctgaatcaaccgttaattcctcttctaaggctgtttcaagtcaggatcggacggatacggatgccaactcacaatcatctgatgatgagcagacaacaacaccacaaaatgatgagtcagctaacacgaccacggcaagcagtagctctgctaacacaagtagtagcgctaaagtggtttcaagtagtagcagtgccactgctacgcagtaataatttgttttacgcgcaataagggggacatttatcgtgttaacttttttagacattattaaccattatttcggttacttaaatattaatggtcgcgttaaaaatcgccttttttcagttatttgtttaattggtgatttttatcttctatataagagtgtgacctactttaaagctcaagcggttggacgaggtgtgattaacctcctcgtctttttggtgttattctattttgcagtgatgaacctgtatttctattatcggggcaaaaatgcggtcatcgatatttcaccgtatgttgaaaaagcgctgggtggtgatccaaacgcgccacatccactaaatggggtaaccgccaaaacgcaagtgatctcacaaattcaaccggccactggcttatttgaagaacaaaatctcttgcccgcgcaactgacaatggacgcggaacaaacccaacgtttaggatccttgattaacgaactgattgaatctggctatcttagcttgaattacgcaggcttaagtgataatgatatatatgaacaagcgcaacaattgcagcgaccaatttatgcgattgggaatcaagttgctttaccgttttatgaaatgaaacaagaagcagatcgttgggtactctatggggggattaacgccattgccaaacaaccgttagcgcagattacgacggttggcttaaccccaatccaagacctagcccaagattatcaacttgcagtcgcccatacttggattacgggtggcccgaacaagatggccgggcgtagtggcgtggttgaaggcaatgatccctatcaattagtggttcagattgcgtaccaagaacgaacaaagtagtcagtggaggaaaataggtggagattcataacgaattcttagatgtcaattattgttaccaatactacctactagaattagtagcggataacggcaattattacttaacagggtagattgtaaaattaatccgaacgctgttcggacaaaaaagatcgccgactagataattttacgccgagcatattcgataaatttaaacttatcggcacggtgaatcgattcggtgaattgaaggagggtattatcttgtagatgggtgacacctttaacactgactacggagctgttaggcggtaggttcagtatctgacactgtccttcagtggcgggaatcaccgtgaactccttactgccataaccaatttcgagtttgagtgtttcttcaaagtaacgatagagtgagtcttgtgcaaccccttttgaaatgtgggggactatgctagttaagacgtagtcgttatcgattaccaggggctgaccgttaacgacgcgcagccgttgaatgtaagtggcaggtaactgctcttcggattcaagatggaaaagggtttggggaacggtcgtctgtgttaattgcaagacttgagtgtcagtatgcatatcgaaaagactatctaattcacgataactggtcaatcctgaaatcggaaaagcatacttgtctagaccgagaaccaaagagcctttccctttaattttatggataaagccattttcaagtagactacctaatgctttgcggacggtttcacgcgacgcaccgtagagttcagtgagttcattttcacttggtaagaaagtgccgctttgatagagttggtgcgtaatcttgcgcacgagatctcgataaatcatttcatattttttagccattcgatattctccaatttgttttctcattcctatcataacggggattcggtgaagtttcaaggttagattaagcgctaacaagaaaacggttttaaaaagtgttgaaaacttgtacgtacatgatatatgattacggtgtactgagaaagcgcttttattcatgctacttttaattcaataagattcgggaggaattattatggctcaaaaggattattcacaactcgcacaggcaattgtcgccggtgtcgggggtaaagaaaatatcgatagtttaattcactgtattacacggcttcgtttttatctaaaggacgaatcaaaagcgaagaccgaagaaattaaagcattagatggggtcattaacgttcaaaaggcctctgggcaataccaagtggtcattggcaaccaagtcactgccgtttatgatgccgtgattgcagaaattgggacagagtttgctggcgaagatgaaacggcccaagttgtggctgcaacaacgcgccaacaaaatttaacgccatggggccatgttaaagaagcctttaatcaattaatcggcgtgattaccggtgcgatgagtccgattgtcggtatcttagctgctggcgggattttaaaagatgtcttggcgatgctaacgatgccacaacttggcgcgttattaagtgctaagagtgaagcgtacattgtcttaagtacgatgggtgattctgttttctacttcttacccatgttggttgggttcactgccgctaagaaattaaaaggtgatccagttttaaccgctgtcatcggtggtgttctggtgcatccttaattagtggctttaaacgggaaatcattgcttgaaatcgggtcattaaacttcccaatggtcaactacacatattcgattttcccaatgattctcgctgcttggttgctaaattaaccaaatgggttaaaggctggttaccaggctacttacaaattatctttacaccattgattgtgattgcagtcgtttctgccattacgctttacatcacagggcctgctattatttggttatcaaatggtttagcattcgggattcaattcttattattaaagagtggttggttatctgggttattaatcggtggattctatcaagtgcttgttatcttcggattacactgggggattttaccaattattgccaacgatgttgccgcaacgggtcacagttactttaacgcgattttaagcacaacaatgattgcacaaggggccgctgttttagctgttgcgattaagacccgtaaaacagctttaaaagaattatcatttgctggtgcgatttcagcattctgtggggttacagaacctgctatttatggggtcaacttgaagttccgacgcgtcttcattgacggtttacttggttcagccgctggcggatttgtcagtgggttattccacggtaatatgttcggtttcgcggggtcgtggatcggctttgcatcattcttagatccaaaacacctagcagatttatcaaacttatggattttcatcgcgtcatcagcggttgcaacgattgtgccatttattgtaacgctcgtttggggttataacgatcaaatgacagctggtgaagcaatggctaaaccacaaaaaccaggaacagcaaaataaacgactgaaataggagagatatcgcatttcatggtggcaaaaagcaacagtttatcaaatttatccgcggagctttcaagattccaacggtgacggaatcggggatatcaacggcattattcaacggttagattatttacaaaatcttgggattgaattgatttggttgacgccaatgtatgtttcccccggtcgtgataacggttatgatattgcggactattaccacattgatcccatttttggtgatttaaccgattttgaacgactcttaaatgaagcccacaaacgtgggattaaaatcatgatggatatggtggtcaaccatacttctgatcaacaccgctggttccaagagagtctcaaaggcaaggataatccgtaccatgattattatttgtggcgtgatccagtggatggacacgaaccaaataattggttatccaagtttagtggcagtgcttgggaatatgtgccagtacttgatcaatattatcttcacctatacgaaaagagcatgccagatttgaactggcggaatgaacacttgcgggccgagatttttaaaatgatgcaattctgggcagaccttgggattgatgggctacggttagacgtaattaacaatatctcgaaggataaagacttcccgaatgatacgtttaaaacgccaagcgacgatgggcgcaatttctatacgaatggaccacatgtgcacgaatacattcatgaaatgtacgaaaaggtctttggcccgaaccaatttgtcacggttggggaactttcctcaaccccaattgatgaagcgattcgttataccaatccagcccgtgaagagttatcgatggcgtttaccttccatcatgtgaaggttgattataccggtggcaaaaaatggacactaggcgattatcggctgtctgatctaaaacgggtgcttagtgattggcaaacggggatggctgccggtggtggttggaacgcattattctggtcaaatcatgatcagccgcgtgccgtttcgcgcttcttggatgacggtcaataccgcgatcaatccgctaaattattagcattagtcgaatttggcttacaaggcacaccgtatatttatcaaggggaagaaattgcgatgaagaacgcgaacttcaccgccgttgaccaatatcaagatgctgaatccatcaatgcttaccagcaaatgttgagcgacgggattgatgaagcgttagcgattaagattttacagcagaaattacgcgagaactgtcgaattccgatgcaatgggatcaaacggcgcatcacgggtttacgactgggacaccatggttaatgccggttgagcacgatgattactcagttgccgctaagattcatgaacccaatagtgtctttgcattctatcaagaattagtgcgaatgcgtaagcttatgccagttttaattgaaggggactaccaattatttgaaccagaggacgaagcggtttacacttatcaacgacacctagatactgaaacgattcgcgtgatggctaattttactggtcaaacacaagtccgttcaataccacacgtcaaggacgtgctcatggataattacgaacaaccgcagtttgatggtcagcaaatcactttacgaccttatgaagctatcatgatgcgggtttaagaaaagaggaagaacgatgtttaattttttgaaaaaaggaccagttggacaggtaacagcccccgttgctggcagttatttaccaattgaacaagttaccgatgaagtatttgcaagcaaggcagttggcgatggctttgccattacccctgatgaacggcaaacaacgattagcgcaccaattgacggtgttgttagttcgattttccccactaaacacgccaccatgattacaacaaaacaaaatgttgagattctgattcatatggggattgataccgttgaattgaagggcgcgccatttacgatgcacgttgaagcgggtgatcgtgtcaaggctggcgaagcgattgttgatattgactggcaacaactagcagccgcccaaaaggcaacgactatcatggtcgtcagcagtaacgccacctttgcaccagcagagccactaccaacaacagttacgactgacaccattattggacagttcgacttagcggcagaataggtgggttaagatgcaaccaatcattattgaatctgatgatttcgggatgaccataccgatttcgcgcgcaatcattactggcttaaaaactggcgtgatttctaccactaatgcgcaagtgacatcgcctcattttgaaatgagtgcggcactcgcccagcaacatgggattacggcaatgggattgcacttggttttcgacaaagaccgcccaattagtcagccactgacgattcccagcttggtaaccccggctgggttttgtcatgcttatcaaaccttacaaactcatccaaaacagttggccattactgatgttaagcgtgagtttcaagcgcagattgaccgctttttggcgagtgggttacaactcacgcatttgacatcgcactattttgtggcaacgttaacgcctgaaatctatgcaattgttctagaactagcgcaaacgtatcatgtccctgttcgcaatgaaacggcgcatttaagaccgacagaacaagcgtcctacctgctattaatatcggaatatgccgttttaacgactgggacgttgataacggcgcaacaaacaccgtatttaacgccacaggaaatcaaacggcaactgacacagaaaaatttggtaggtacgccggtgatcttaagccatattgggtatttatcggcagagttacggcataagagtcgtctgacgacgaatcggctagccgaattcaatgcgcttaaaacattaaagcaaaccaattattgggatcaatttagttggcaactgacggattactcagaattaggagcgaagtagcaaatgacacaatatcaacatttaacagtacttggtgatagcatcacggatcaacgtaatcattacgcacacaaatggtactaccagtggttagcagaatggctcgcgattcccacaatcaccaatctcggaatttcggggtcgacgattgcccaaccgtatgatccgatggttgaacgctggcaagccattcctgaatcaacggatttattattgatttatgcgggtgtgaatgactttggtcgtgatgtaccacttggtcaatttggtgatcagtccacagtaacattctacggcgcactacaaaaattacttgggcagattacgaaacgttacccacaagcgacggtttattttatctcgcacgttcacattgggactgacttcttttcggccgtcaatcaaggcggttatcagcaacaaaattatgaacaagcgattgcgcaagtgacggacttgtttggcgttcagcatatcagtttgtttaacgaatcagcgttgtcatttgcggatgcacaacaagcggctgagctgagtttagacagtctccatcccaatgatgctggccatgaaaaaattgcccagttcttgagaactaaaattagataagcaaaaaggcatcgagctaaaagttaatttaagctcgacgcctttttttgtggctgaatttaagttagattagaacaaatgatgacggatttctttagaagagttggccaatcccgtagtgaatggccattgtaattaaaccaattaggatgttccgaataatggagactttgactttgccatcgcccagtttagcgctgataaacgcggtaatggaaaccgcgatggtgacggcaatgattgtgccggtcatcttgtaggcttcaggcagtagaatcattgtcacaagggggaagacgccaccgaaagcggctgagaagagggatgcaaacgctgcggcccacgggttcatataatggccaagctctaggtcatatttaacattaacaattgttgccaaaggcttcttatgcattaagtccttagcgattgcgagtgccgtttcagaagtgacacctttggcttcgtaaaaagcttggacttctttaatttgatcatctttagctgtttttaagcgtgcttgttcaatggcaacagcggctttttccgtgtcactttgcgaactaactgaagcatattcacccgccgccattgaaaaagcacaggctaataaatcagcaagtccagcgataaaaatggtgaaattattggttgttgcggcggcaacactaaagagcacaccgacaacggttagaatcccgtcattagaacctagaacgccggctcgaagggtattcatcttttcttccatcgtttgatggggtttttcagttgttttgagtggggctttaagaggggtcataaaaaaatcctttctaagcgattattgtttgaataatgtcccaatagcgtaagtgactaccatggttaataatccggaaatcacattgcgcaacatggcttttgaacgattcgctttgccgagagcggctgcactgtagccggttagcgcaagggcaatcatcactgcaatgatggtggcttgcacgcgaatggtttggggtaataaggtgattgcggctagtggcaaaatagaaccgattggaaatgagatgaatgacgcaacagcggctgcgtaaggactggtaaaagcagtcgggacaaacccatatttttcacgtacgacagtcgtcaacggatcagcagtcatcatttcatgtgtagcccgatcggcaagttcaggatcaatcccagtgttgacgtatttttgccgaacaaaagccatctgagacgcataattactgtttaaattcaatttcgtattaatgattgccatttcctgtgcgtctttttgcgtgctgacagagacgtattcgcccatcgccattgagatcgttccagcaatcattccggcaattcccgaaatgaagatggcgaagctattgcttgtagcgccggcaacaccgataacaattccggcgacggataaaatcccatcattggcacccatgacgctagcccgcatcacgttaattttttgggcgagtgataatttttttgacaaggtgaagcctccaatactttttattactttataatgattataattaataacaactttcattttagtcaatttaatttgaaagtcaagtagcaacctagaccaattaaatttgaaaaatggcttgccttcgagtgtactttaaggaatatgctaaagacattgaagaaggggtgattaaaatgagtcgcattttagtattaggggcaaccggacaagtggcccagttagttattgagcaactgttgaaagaaaatcaacatgagctcgtgctatatttacggcacgctgaacggctaagcgcattagcacaaaatccacatgtcacggttattgaaggtgatgtgttggatcaagagctgttggcagacaatttagctggggtcgatatcgtttacgcaaatttaggcgggcagttcgaaccattaatgcaaaacgttgtcgcgacaatgactgcagcgggcatcaaacgattaatctatatcagtggattaggcttgtatcatgaagtgccaggtgcttttggtgagtggaatgaacaagcagtcggccatgaagtcatggaagacacgcggcgggcggcgaagattgttgaacaatcttcgcttaactataccattttacgttgtgcctatatgaccaatgaagatcggattgattacgaattaactgaaaagggaacaccgtttaaagggacgattatttcacgacggagtatcgcgcaagttgttgttgatttagttaatcatcctgaaaaaggaattggggcaagttggggcattaatcagccgaatattgatggcgatcgtcctatttattaaaaaacttgccttatagtatactctaaggtataagctatttttgtaggagggatgtcgatggcacaagagcagtacaaaatcggcgagtttgctaaattggttggtttgtcgacttacacattacgttactatgaagaccaaggcttgattatgccgcaacgcgatgcggccggtgtccgcttttatacattagaggacgttaagtgggtcgggtttatactccatctaaaagggaccggtatgcggattacagaattaaagcaatatgttgcattgcgggctcaaggagacgcgacgattgaagcgcgcaaagctttattgcaaaaaacaaaggctcaagctgaagccgaattggctgagcgccaagcaaatttacagatcctaacgcgtaaaattgattggtatgatggtaaattggatcagagtatcgatcaagcagagagttttgaaacgtatttacaacgatttgaatcctaataaagtgaggttattagaatggttaagaatgaacaattaaaagaaaaacaattattcccagttggagaagctaatgtggcttatcaagacttcttcgtcggtcaaagttatttatcaatgttagtgaacgaaccagacgtgaatgtcggtgtcgggaatgtcacgtttgaacctggttgtcggaacaattggcacatccatcatgctgggtaccaaattctattggtgactggtggcgaaggctggtatcaagaagaaggtaaagcagcacaacacttagtcccaggagatgtgattgttactaaagacggcatcaaacactggcatggggccactaaggatagctggtttagtcatgtcgccatcactgccggcacaccagaatggttagaagctgtttcaaatgcgctttatgacgcactttaattcagaaaggggtttttaaaatggcaaagaaacaaacagcaggccgcgatctattgggtgattttgcacctaaattcgctgaattaaacgacgatgttttattcgggcaagtttggtcgcgtgaatcagagttaccagcacatcaacggagtttaatcaccatcagtgccttgatttcaggtggtaattttgaataattaccagcgcatttaaagattgataaggaaaacggcattactgaagctgaaattgtcgaagtgattacgcatttatcattttatgtcggctggcctaaggcatggtcggcgatgaacgctgctaaagcggcttatcgaccagaataattaatcagggattaggacagataagattgtcctgatcctttttttgatggtatgatagacaaacaaatcagcatcaagaagtggaggaaaggccttgaacgagccacaaaaaaattataccaacggtgttttaatgactttatcagtgattggaatgaaatggaaaccgttgattctctgtcatcttgtggcaggacctcaaagaccggccgaacttaaaagagtcgttcagggaattccagccaaagttttaaccgatcaattacgtgaattggaacgagatggcatcattactcgaaaagtttttaacgaagtacccccacacgtggagtatgcgatttctgcgtacggcaaatcattggtttccgtcctaggaatgatggccaagtggggcgaagatagaatcgactttttacagagcaatggtgatgatgtgcagttggattatcgagaccatgagaaatacgatatttaaagaaggcgataacatttattcaaaaagaatgttgtcgtctttttagtgatttcacaaaacttactttgaggtgcgttagttagttgaaagtgcgtaattgtttattgcgaagtacccgatatactaaccttatcaactaaaaagtgaggggaaaagaaatgaatgatattcaaaataaagtcgttgtgattaccggtgcatcaagtgggattggtaaagagacggccaccttattagcagccaaaggtgcaaaacttgttttagcagctcgacgaacaagtgcgttggcggcgttaaccgctcaatacgacactgaggttatttaccagcaaacggatgtgacgcaattagcagacatgcaagccttaatcgaattgacaatcgctaaatttggtagaattgatgtgctattcaataatgctggcttaatgcccgtctcaatgctacgcgatggtaaagtcgatgagtgggaggctatgattgatattaatatcaaaggtgcgctatatggcattaaatatgccttacctttaatggaacagcaaaagagtggtcatatcattaccacggattcagttgccggtcatttcactggtgaaggcttatccgtttattcagccactaaatatgcaatgcgcgcggtgatggaagggttacgtgtggaagaagttggaatgggcattaaatcaacgttaatctctccaggacatgcgcaaaccgaattagccagccggattagtgatccgcaattacgagcagctgttctcaagagtgaaactgaaactggattaacagcaaccgatgtcgctaatgccgtaatgaacgccatcgatacaccagataatgtgggcattaatgaagtcattctccggtcaattgatcaaagagactattaagcaattggtcaaagattgaattgagtcttgacaacgaacgctaaaaataaaaaatattttcgaatggtctagttcagcgcttgcaatcgtaagttaacggcactttcaaaaaggctttaaaatcagctaccacaaattgaattaaatacaagagtttaaattagaatgcttagcgtgtaccatatatagtgttgtttcgtcagatggtacatcaatatatggaaagtggtgttgacaatctggagtgataactaaattcatataaagagggtttcagttcaatgcaagacaatcgtgcaatcaccagtgtatttaatcctaagtggtacattcaacagatgaaagggtggacaactataccaattattatgtagagctattttttactttagttaacatttctttaatttatcacaaaaaataatagtcctaacatgaataactatattttcctttcccaaattcatactaattatattgataaacactctagtctttttagaaaaagcgttcaaaaaaacagctttcttgatatcaagaaggctgtttttacttaattatccaattttaatattcaaattgacgatagtatctacgaatatctaaatcatggccagaatgttcttcaaggtgttttgataaacgaccatttaaaacgattgtagatataattggtgaaataattgccttaaaatcatcatcaaagccactaatcatatagtcattaatatcaattactgttaaattattattttctttctttaagaacttctcggcacgttcatccaacgagcgatacttgccaacacccttaattaagaatacaggcgtatctttttctactaattctaatgttccgtggaaaaattctgctgaagtaactgctttagtcttaagccattgcatttcttcaagaatacacattgtataaagataaatttcaccccaaagttcaccgccaccaatccacagttgatagtctgtattataatatttagcagcaatttcttcagctcgactatcaaaatctttttgtactttaataattccatcaaccatattctctttgatttgttcatgaaactcactaaatttaggaaaatcaccattatctgcgagcaaaccataaaagataccatacatgctaagatactcaaattctacacctttaaatgtttgtaatggaattcgccaatcacataattccccaactggtgaatctttacttaataccattgcagcaatacgaatacccttatcctttagccatttttcaatttccacaatttctttagtatctccagattttgatccagtaattacgattgaattttttgttaatttaggattatcggttaaaatcaattcgccggcctgttctaaataaacaggaatattagtgtattcttttgctagtgttacaaagttcatcatcattgcataagtgccaccaacaccaacaaaaaagatattatcatagccttgttttgtaatttcatcggcaatttttttaccttcatcaacagcctctacttgagcaataagatcatttttatactttgattcatcaaattttaacattatttatatctcccttttttaattagcttttaaaataccaaattgagcacagataataccaaatatagcagtacctataattatccaaataacgttaaccttcttttgtaagagataataatagatacctgtaaatcctaacggcaacattcctggtaaaattccgtctaaaacttcttggatcttagttgcacttgatcccgaaccaatttttaatgccgtttttgcaactactaaattatcaaccattccaccaataaccatcactcctaatattcctgccgccaacataaatgttgccataacaccagatttctgaattctagtaatgaaagtggagcccaattcataacctttcattgaagtataataacgtaatgcaaaggtcgggacattaaagattaagaaaaatagaatagatcctaatatatttcctttaactgctaatgaagctcctataccaactgctaatactctaagtgtgccaagtataatcgaatcgcctagaccactaagtggtcccattaacgctgcttttactgctgtaatcgaagacgtatcgaaattatcttcttttgcattttcttcctccatagcgagtgttactccaccaataaaaggagtgatatgtgctgtacagttaaaaaactctagatttcttataagtgcttctttgagcttttccggctgtcctttgtatatcttctgtaatccagaagaaatcatgtattcaaatcccatatgcatttgtcgttcataatgccatgaaaattccataggtaaagaacgccaaaacatttttcttaaatctttcttatttaatacatgcttatcagaagtcttcatcgtcatcaaagtcgcctccttctagagatgccttgttattgtctttaaactgcattaatacaacgactaaaattattcctaaaaatgcaattccgataactggaagtttgaagtacgcagctagtagaaatcctaagaaaaagaatggaacaatctgcttattcataatcatttgagctaacatagcaaacccaatgcctggtaacaaaccggtcgcaatggttaatccgtcaataatagacttaggaattgcattcaccagtattttaacttgatctccgccaactaaataacttataaatacaataattgctaacattaaacacaatagaaatcctgcggtcatatgcactttattaaccgccttgccattaccttgacttgcatatttgtcagccaatcttcccatcattggccgaattaacgcaaacattacgttatcgaaaatcaatgcaagtaacgcaatcggaaatgccattgcaaacgccactgctggtccacttccggtttgaatagcaaacgctgttcctaacacaccaccgacaattacatcgggtggtataaaggcaccaacagagtaagaccctaaaaatgcaagttctaaagtcgcacctatttttactcccattgttatatcgcccataactaaaccaacaattggccctaaaataatcggacgttgtaactgattggtacccgtagcgagatcaagttttccaacaaacgcaactagagctaaaagaaaagcttttaaaatcatatttgttccccctaactacctaaataagagttttaacatttaccttcatatcacttggtaccatttgaatattaatatcaactccttgatttatcatcttgtttaataaaaccctttcattttcggtgatagaaattacctttgaaatattaactttatctttacttggtaatgttccaccaagatttaattgtttaatttctgggtatccagaaattaattttgcagcgctttcaatatttgcaacaacaataaaaagattatatttatccgtgacaccctcattcaatgattcaatagctttatccactgtcttgataactaacttaactccattgggtttggctagtttcatggcactttttttcaaatcattctttgccgtatcatcatctgcgattaaaatgcaatccgcagacaaagtagatgtccatgaaaaagcaacctgaccatgtaacagtctatgatcaactctcaccatttttatcatttttaactatctcctttaaaaatcatcatcattagacttttttaaactttcttcatcaagatattgaattgaattctgggtactcgagatcgtatgacgaatcatctcatcaactgatttattatttgaaatattaagctgactaactaattcaattactaaggataaattcattccagttatcaaatagaaattatcccgactaatatactttaaaaattcattattaacactaccgccaaataaatcagtaacaacaataagatccttatcactgtttttctcaacaatttcatgaactgtttctggtaagttaaaattagaatctacataagtatcgacactagatacgttatctaattttccatagataatctcaaccgaacttaatacacctgaaccgatttttccgtgaccaattaaaacaatttgttttgtttttgccatgtgatttcacctcaaattccaactgtcaattgaaaattagtatttggaccatacaaaattttaacattctccaaaatttcaccttttatatctaagatgtcaccttcaatttttaaaagaggagtttgagtatctacttctaataatttaccttctgtcgctgatgcaaaaacagcattggaagacagatgtgcagtagctggcgaagtaccataatattttcttaaaatatcgtataaagaatttttctcaaaatcgtaaagatctaacttaggatacttgacaagatcaatgtatgtttcatcaagtgttaaccaaatatactttttatcaatacagactcccctcaaccgctgcagataaagtttttttccattatccatcaccttcttctttatctgcctagttattggtgtgctgcccatttcagaagcataatcagaaaaacccttataattaattatattaatccttggttttatgttcttaacaaagctcccttttccttgaattcgctcaactaactgtaacccttctaaatctttaaataccttttgaattgtagatcttgctacatggtacttttctacatacaaactctccgaaggtaatttatcccccttttttctgttcaaaagaatatcactttgaatatcagttaaaatttgtgtgcgcacattatcatgattattttttctattaattgccatattcttttccccaacatgagtacttgattaatcaagtagattgtaagcgctaccagagtgaatgtcaagacctatataaatttttttcacaacaataaaatatctaaactcaaaagatcagagccgttccggctctctcgagacactttccctatcaacgagaaagtgtcattgatttcgcttcttttgacacctgctttatgctgattcagctccagattcgtctctaaagctcaatcagcaatagcaacaaccgtttaaacgcaactagcccttgtccctggtcacctcgttttaacgtgacgtagcacgtatgcttttgtttaacgtgattgcatatcaaaactcacaacgattacagggtggttgattccatttcctagtgttccattcagcataatttttcctccttataattcaaacagttatttaaaaacatttgttaagataccagttttttgaatataataacccgcggtaatcccgattgccataaaaatcaaaacgaaaagcgtcttgaaaaatccaaaagtgatgataaggaccgctaagagcaatcccataattccaccaattagtggccaaaaataggctttaatgagttcggtcacgatatcacctcctagataactcgagatttatgcacattagcgtccaactcattaaaatcaacgagtctgattttaatttttttctgttcagaaattccaagacaaatacgcaaatctttttttaattgattaagaaaatttgcagtctgtttcttggcattgactgaatttagtagatcacccgatattttaagtgtgatcccttttcgtgataacttagatgataccttggggttgccaataaagggttcatgttgaagtgctgaaagcgcaaaatgttcaatagctttcttactgatggtcacttgaccatcagacttttgatgaagatataatgattgtgaccgtggccaaaaaagtgtgataagcaaaaaaataattaacagtaccgccagaattactccactccaaaagaggtatatcggttcgtactgctccaaccaagctttaatgacatgggtgtactagtaccaatggccgttgaccaatttttaaagacaagaactatggataaaggaaatgcaaggataataacaactactattaatgccttaaatataaatcgcaaatcatcaccacctttaccataattatagcaggacaggtagtgatgatttgcgatttatatgttcttataaggaaccaattaagatttttgtttgactaaaccaatctagccaatagggtataccctattggccttttttgattctgtgctatactaggaattacaaatgttcattagaactgtccaaaaggaagtgctgacaatggctaaaattggttatgctcgtgtgagttccaaagagcaacatttagatcgacagctagcggccttaaaaggcgttgataaattatttacggataaattaagtggagctaacactaatcggccagaactgcaaaaaatgctggcctatatccgcgaaggcgatattgtcctggttactgaattagaccgcttgggccgaaacaaccaggacttaactaagattatgaacaccattcagaacaaaggtgccaccctagatgtgttgaatttgccgtccatgacggggattgcggatcctaacttgcgtcaactgatgactaacttaatcattgaactgtataagtatcaggccgaaagtgaacggaagcggattattgagcgtcaacaacaggggattttcctggccaaacagcaggggaaatatcatgggcgcaaaccccaatataccgaagatgatccccgcttactacatgcttttaagctttatcagacgggcatgagtgatgtagacgtcgcccgtaataccggtattaagcgaacaacttttatcagatatcgcaagaagtgcaatataaaaagatgagatttacatgcgataattacgttatactagtttagagagggcgacataatgatcattcaaacaaagggacttactaaaacttatcaatcaaaagtggtggttgaccatattgatttagcaatcaaagaaggaagcttaactgctctactaggacccaatggcgctggtaaaacaaccactatatcgatgctcacaaagatcttaaatccaaccagtggaatgatcaagatgaaaccagacataaagattagcatggtatttcaacagagtattttagataatgatttgacagttatggaaaatttgagtattcgaaatagactttataaagaagccaaatctaatcatattgatgctttgattcagaaaatcgggttaactgaatttattaatcaaaaatacggccgactttctggtgggcaacggcgacgagttgatatagcaagagctctacttaatcaacctgatattatttttttggatgagccaactacgggtttggatatccaaacccgctcggcaatttggaaattgttgcattcattgcaaagtcaaaataatttaaccattattttgacgacacactatcttgaagaagcagacaatgcagatgaggtttatattattgatcatggcaaaataattgccagcggatccgctgatgaaattaaaacacaaaactccagcagtaaactcgtgattgtttctgaacaagctgatcaattaatggcattgataccaagtaaaataattcatacgcagattaatcataaaaccatttgtttaaaggctaattctgacgaagcactctcattattattaaagtttcgtattttcattaaaacgttcacttatcaagaaggaacgatggatgatgcttttttgtcattaaccggaaggaagatgcgttgatatgattactttaacaaggagaaatctactgttgtatttccgcaatcgccccggagtattcttttcattattgggagcaatgatttcatttctcttatatattgtctttctaaaaaagtcaatgataagtagctggaaaactgtccctagttctcaacaattacttgatttttggttgattggagggactttatcagtgactgccatcacaaccacccttacctcacttggacaattagtaaaagataaagaacgcaaggttattaaagatttttatttaacagacctttctcattttgaaatcaccatgagctatatgttaagtgccgctttgattggctttattatgcaaatagttatgttcgcactgatgataggatacttttcaatcacagataacttgaccatgccatgggagtcgctaccagctgtaatttgcgttgctctttttagctctttactagcagttgtaattaatatgctgtttatccagtttattagtcgctttgattccttgaacgctataggaacaattgttggcacggcctctggctttttagtgggtacctatattccaattggtattcttcctaactttgcgcagttacttatcaaattaactccgggtgcatatgtagcagccatttatcgacaaatacttatggcagataaattaaaaaccgcttttcatggtcagcaaagccattttgaaaaaacgatggggattaagttagagtggcatcatttattaactggaatgcaaacgactgtgctccttaccgtagtttttttattaggaatagcagttttactaattgttgacttaattcgaagcaaggaaaatgtgagaacggttgattgagatagcaaggaaaatcatgctaaaaactatgcagtgtcggatttacagttcgactctgaatgttcgggaatgactttctatgtttatcgtaaagtctaactaaaaaagtaactattaagtaaaaaaagtatcaaagttagtgacctgattttgatactttttttcgtaaagcggtttgaaattttcaatgatgtataattggtatcaacaactaaattgattcattaattgggagatagtgactatggacaaaaggattgtgcggacgcaagctaaagctgaaaaagctttgtttgaattgatgcaagaacaaaacttttcagaaatttcaattacggatattgctaatcaagcaaaaatatcacgaatggctttttatcgcaactataacagtaaggaagatattttgaacaagtttattcaaaaagaatatgcaacttttgttgatgacattgcgacgcatcattttaaagaattagagcagttgttggaagtttattttgattattttaaaaataatccagctgttttatcggcaattgttagcgcttcaattgaaggctttgctcttcgaaagcaaagtgactacttgcttggtttttttaaaacgcgaattaaaaatcagcagccagcaccaatagagattgcatattattcgggcgctatttttgctagtttactatattggcgagaaaacgattatcaatattccgcagccgagttggccgagcacctagcagaaaagatcaaaaatgatttactgcaaactggcgaaaaaatattttagccgattaatggaaaaaacaatcaaaaaaagaggcactacaattttacttttgcagtgcccctttttactagactaaattactttgttagaccatgtcctggagtttgagtttctcgtaaataaactggatcggtcttagagatttgagaattatttgaacaaccacctagtcgatgacgacaacaactgtcgttttggggtttaagatgttttccaattacaaccccagtaactaaagcgattggaactaaaattaaatgccgctttttcatgaacttttcctcctttgatttagagtaacttttgagatttcaaaatttcttcaagataggtgccatggacctttttcaaaaaggcatttaaaccaactttttcaatttgagttaaaggcaattcagtcaagcgctttttatcattcaaataatataaggcacttaagattgttcgtaagtcaaaggctgaattaaagacttctggaacgccacgatcaatgtcaagcagtcggtagaccgcttccatagcagttctgacagagtattcagttgtaaagacggtgtctcgctcagtttcggcaaagttcccaataaaagccaaattgcttgaaccttcagggacaactaaaggacgatcgccagcttggcgtggcataaagtacgaagtaatgtatggcatgtgaattggaattgaattagctgattgcgcgatctcagcaatttgattttctggaacaccaatatgataaagaaattcttgacagatttctgaaccactgcaatcagtaatttctttgtgaatataatttccgggttgatcggaaaagagaccatataaccatacaattaattcatttggcttttgttgttgaaaatgtggttgacggctgatagaaattcctaataaccaattcgagtccctaatggaaactggaccactggtaacaattgaaccactatacggatctttaccagtaattttttgaatatagggtacgattcgatcgtctttaaaggtgcaagttgccgacatgacccagttagccgctggaatattttgataaaatttagctggatgcccgaaagctggatcttgagccgctaatttttcccataattcccaactagcaccgattggatgcgttgctggtgctgaatgttcattatcaccgtaagtcgtgctttcggtaattgatccatttgtaacgaaaaccaaatcgtcaggcgtcaagtcgagactttgttgcttaccatcgaccattagctcaattttaacagcttgtttttgtttaccagtttgtttaacaatgatattgtcaacggtggtattgtattggaatttaacgtcgtgattttcaagatatttaatcaatggtttgattaatgactcatattgattatatttggtaaatttcaatgctgacatattttgcaaggtgccaacatgatggacaaaacgcaacaaatagcggcgcatttccatcgcacttgcccaaggctcgaaagcaaacatggtggaccaatagagccagaaatttgatttaaagaagtcatcgctgaaaacttgattaattttgacattgtcaagttggttttccggtgttagcactaacttggccatttcgtcaattgcttttcgagaaagcgtcaactgaccatcactaggcaactgagtaccacgtttttcgattacgcgggtatgtgaattacttggatcggctttatttagccaatagaattcgtcaagtaccgaaacactggcatcttctaaggtaggaattgaacgaaaaagatcccaaagagtttcaaagtgaggttccatttcacgcccaccacgaataatatagccgcgttgttcatttaaaatcccatccatgctgccaccgggaagtccaagttcttcaaaaacatgaatttggtttccaggaacctgaccatcgcgcactaaaaaagcggcggcagctaaaccggctaaaccggacccgacaatataagctgatttcttggtggcgtttgctggttttttaggccgagcaaatgcttcataattaccactactgtagtacatgaaaatccctccttgtaaaataagataccaagtatttgttacatctgtaactgaatgtaatatacaacagttaacaaatttattcaatcaaaatgctcctatgtcaataaatggcacatctttttctaaacactcgttctaattctgtcggaattaaaccaactgatgtaatttgaggttcggattaccaagttcaacggttatacagaccgcggttaatgatgaaggaacacgccagaaattctctggcgtgtttttttatggcctaatttggacatgcgtcattgtttttgttataatgaaaccaccattgaggaggcactaacttatgcaagtattgattcttgttttaacttatctaatcgccgttgaacacatcggtatcatggggctggaaatgtttgccagtgctgaaacaaaggcgaaagcttttgacatgccgctggactttgtcaaactaccaaatgcccgcgtggcactggccaaccaaggcatttataacggaatgttgggcgccgtaattatcatggtcaacctgttattagccggccaaacgctcaagattgtcctcgccctattaatgctctacatcttcatcgttgccctttacgggacatttaccgccaccaagaaaattttcttcttacaaggcttacccgctttaatcacattattgttaatcttattcttctaaaaaagggctttaatcatgacaaatccaattctcatcaccaccaccgaaactattcctggtaaaaaatatgaagtgctcggtgaagttttcggtttaaccactcaatccaagaacgtcttcaaaaacatcggcgcttcattgaaaaatgtcgtcggtggcgaaatcaaagcctatactgaaatgatgactgaatcacgcgatgtagccatcgaccggcttcgccaaaatgcacttgaaatgggcgcagatgcggttgtcatgatgcgctttgattccggttcaatcggaacagacatgcaatcagttgccgcttatggcacggctgttaaatatatcgactaacaaaaaaagatgaacggttccctgttattcaggaaatcattcatcttttttaatttacttattaattctaatcaacaacttaagccgctggtgctgcgggttgtgcgctatttaaagtccacgtaatgttgctcgagaatgtatcaccagccgcaagttgaatacttggattggcacttaatgctaatttcccagcaacttgccatgttttcgacatcttatccgtcataatcggtgtttcagtaccattatcagataatcctacgttcgttggcaagccagtcatattaatggctgtgctgcttaattgtttgcctgtggttgatgccattttactcatcttcgctgtcaatttccaacctggcgttgctctggtatccgtgattttcaacccatcactgacctgatattgcttgtcctgagcagttgtaccaacataaatatcttttgataagacgttcccaaatctaaagctaggcacttgatccaatgacaacttaccaactgctggttgcgcttgtaattcagcttcgttagaaacaatcgtaactttttttgaacttccacttgattcttccgttacgttagtcgttaatgttagctgtgctcgataactctttccagccgtagttgcagctgcagcatctttcatgaaagtactatctttactaaaggttagtggttgttccgtatttaagttcgctaaatttgtaatgtcacccttaagattagaaacaccactattagtagcgggggttattgtcttatcctcaccatctgtaaattgccattcataatgccaattactcgttgaaccagatgccttagctaggtctgacaaaccatcaactgaccaagtcccaccgagatccgccgctttcttgtaggctgctaacccaccaacataaaccgttttctctttagagacattccctgcagcaattttatatttagctggaatccctggtgtattcggatctttattcaactttccagtataatacgaatctggcttatacttttcaccctccacatcaccatttcccgccttaacagatgttttacgtccagcatcaggtgtgaattttagtaaatccttggtactgcttgcctgccaactaatatcatcagtagaattagtcggcgtgactatggcactggcaccataatcaacgtctgaataaattacttttggtgtgccatccgcgttatcagtatccgcgttaatggcggtggccggaattggttctggtgtcacaacaactttagccaatcgagaataaaacgtcttataattcagcaatccatctgagaaactgaattggtagtagtatgtgccgactgggacatcctgtttctgtccgattaagggcttatagacaagattataactatcaacatctaaaaatcctaagctaccccagaaaagtgaccacccagtttttcccttacgctgacttcggtctttaacccatttcccttgagtagcatcccaatgccaacgacgaaccgttatatctttacctaaaccattacctaaatttgttagaatactcattcctgaaaatttagctcggtcaatatccttgtatgcaatatattcttcctcttgaggttgtctactaaagcctcttctaagaattgttagttaataagaagctccacccgtcctctgtggggttatctgcattacttggctttccagatggttcagtactgaccgcagccggtacttgagcagctgtacttggcactgcgtttgctggtttttatcacttgattgaggttgctctgtcgtcgatgctgcgtcagttgtcggcgtacttgattgaacagatgcactcgccgctgattcagccgccatcacttgggctggaccactaacgaaactactccccaataacaatattgctaaacttacataaattagacgcttactttgcatcatcttgcgtctcccttctgacacgttgttggtagcgccacataataactaatagaatgattgcgatacctaacaaactgagaaatggactttttagcacactagtctgtggtaatcgaccagtcgttgtggcttgtccatcaggtgtataacgaattacttgaccattctttggaatatcaggttgtgcaacgccaacatctgggagtgtcggttttgagtgatcgatatgcacagtaaagctaatctcactttgccccccataaactgaggaggcatgggtcggctttactgttatccccaatataataaccataattgctaacattaaaactagaattcggttacgtttcaataaattatgcgtcatgttctcctgcacccctttttcgaccagtcagataggcgattaaagcaattactagcagtagtaaaattcctaaagacccccatagccactaattaatgcctggtttttctggattaatcaatgtcttattgacctgttcacgagctgctccatcaaccgtaaagttgcgttttaaactgaaagttttttcccccgaaaccattttcacatgatacgtatactgacctttgggtaaaatctgattatttgtatcaattgcatattcaaatgttgagcgtggtgccatggataatttattagcactcttttgatagagtttctttgtctgattcttttttgtcacccacgcatttagcttaattttgccaaacatggttggttcgctattcgcaatttgcccgacaactttcggtacactaccatttgcttccaattttgccattgtcaccgataacttaggcgtaatgttcttgtcaaaattttgtgaaagcaatgctggaaccgtcattgcaaaactgttattaatcccaaagcccttcttttgagcttcgtgattagaggttcttttaacataaacactccctaaaagggtgcccctgaaacctttatcggggatcttaagattaaaagtgatctcccttgaagccccgggagccaacgtgaaactttgtttgcgctcgactttaggggctaaatcaggtaacaacggtgcttttgttttgaccatcttttggtgagatggtgtgtagtcaatcgtcccgttatttgaagttgaagccgctaccagttttgcgtcaaaatcatttgcttcctgtgtatttaggttctgcacattgactgtgataggatatgactgtcccttttcagctttaattgaaaaatatcccaaactagcgtccgtttggccggtacgatattgggctgtaacagtaaattcagcgccttcagcgtgtacgttctgcgtgaagctaccaatcccaaccaataaacatattaaactcaacaatgaaactaaacttttctttttcaacaactttgtagcctcctataaaaataaggggtgggcaaattactttgcctgcccctcatcaatcgcttcgttaactttatccacttatttcgtgcgtttaatagtaaaatgattaagcagttggtgcagttggtgttgttgatgaaagattccaattaattgttgttgtgaaactctcatctttagctaaatcggctgctggatttgctgctaatgttaacgtagctgcttccatcttgaaattatcgacaccatgtttcccgttacctttaaccacttcaacggcaggagaatcgtccttaacagcacctgttaaagtttcaccaagtgaaccagtagaatctaaattcaatattgcgcctgttagtttattagcatcatctgtgaattgagccatgtcagctgtcaacgaccagtcagatttgcctaaacgtatatcagcaatttctaaagcgccagctgttttagcaactttaccagtaaaaccagcataaatctcactagcttcaattgtcccaaagctgaaacttggtactgattttaatactaatgtcccattttcaggatctgttgggtttgttggatccttagcaacaacactaaagtcggcttttgatgtttgcggagcaactgcgtcagctgatactgaccccactgtcattgctgttggtgctaccattgttgctaatgctgaaaataattttgtcttcattgataattcctccaaattattattaattacatttaatatagtagcacgcaattcaattgccggataacaaaaaatagataccatacggtatctatttttacccttcactaattattcgttaaaccgattccaatcctgtcctagcagttatttccccattaccattcttctagtgtaaacagcttgcccggaatgcatgaccgcatcatccacgattgagactaagcgtgcttcacgggtaactgccggtgtccaattttcatcaattatctctaataaagactcgtcagtaacttcagccaggtaatcaagcgtcaattgcaatgcgtctgctaagtaaccaattaataatgctttatcgatgataatcactttggctgcttcttctggtgaatgcgaccaatcttgcgtttcatcgggtagatctaatgcaaatttttgtgaccaacctgcacgtatccacaatggttgtatccctttcaaatccgcaatctgataatccatttcacgggcagtatgccatactaaccaggtcaccgatttaattagtggctgcggcattgtattggcctcagccactgtcatttgttccaatgtatcgagtaatcgttcttgagcgcgttcgaccgttgcacttaatagttgcgttgcatgcatcttatcatcctccatatctaaaagttaaccccattgtatcattaaaccactactaggcctttttttatgaatttaccaaaccattacgaagctttacactttattttcactagaacaacaaacactttacattatttgtttatgcttaaccttgtaaagaataaaaaatcgttttacaagaagcaatcaatatgcgcatgagccaaacaatcatcccttacgtggcaacaacaactttattacttttggcagccggctgtaccccacaaaaaaatactaaacaatcgacagctcatcaatccacccttgtccctaaacaaaacatgagtcgccacattcaattagccggtgcgattaatactcgtgatctaggtggaattgtcacgaaaacaggtgccaaaattaaagccaatcggttaattcgttctggtgaattagctggtttaacaacgaaggataaacagaagttaaccgttggaaaacaattaaataacatcgttgatttacggactagtagcgaagttgcggctaaacccgatcccgctttaagcaacgtccactacaatcactatgatgtcaccaagtctttagggacttcggcaagtcaagctgactttttcaagaatctcgataaggttgatggtgaagctttcatgattgatattaaccaaaaattggttactgatcccgcagcacgcacgaactataaacagttctttaatgtcttattgaataataaaagtggtgcgacactttggcattgtacagccggtaaagatcgtgccggattcggtactatgttagtcctcagtgccctcggggttgatcaaaagagcatcatggacgactacctcgcctctaataaatatcgccgcgccgaaaatgaaaagacaattgaacaaattaaggtggcaactcacaataaccccaaagccgttaaaacgatcactgcaatgatggccgtccgtaaaccctatctacaggccgcatatgacacaatgaacaaagaatatggtggcgttaatggttatttgaaacacgggctgggtttgactaaggcggatctcaaccaattaaaaacgatgtatcttaccaagagttaatgcttcatcaggtagattcactattctcgtctctccatttttttggtatactgctccttagaatcaatcagttaaaggagcctcatcatgtcacctgctcaacatctcattttattattgatcgtgatcattgctgcaatcggcgtcttaagttcatcagtcatcttattcatcgcccaacaaaagaaaaatgaccaacttaagaagaaatcgaatgtgctcttttgggtcagcatcctcgtgatgatgatctttctgaaactaatcgatatgcttcaataaacaccaaaaagcatgccagtcaaatttgactagcatgctttttttgcaatctatcttctaaaaaaccacccttaatgctttgctaagttacaaaacttggtctaagcaattttattgttccccacctttgaggatgttatattaactactaaaggaggtgtcactatgaaaaccttagacaatatcgcgcttactttattaatcgttggtggtttgaactggctacttgtcggtctattcaaattcgacctagtcgctatgttatttggcggtcaagcagctattatttcgcgcatcgtatatgtccttgttggacttagcgcattatattgcattaagttatttgcacccatcaacagcgcgcagcatgaatagctttctggagcggctttttatagggaccaaacatcctgctcgtctcaatcgctatccattaacgtgttggtaaaactgttatttcttttcaataacgcaaaaaagcgtgctagtcagcctcgactagcacgcttttatttttttatttacctttggtatcttcatcattcatcttcaaaatggacatgaacgcctcttgtgggacttccaccgaacccacggatttcatccgtttcttaccggctttttgtttttctaacaacttacgcttccgggtaatatccccaccataacacttggcgagcacgtttttccggtaggccttgactgttgaacgggcaatcactttattcccgatagctgcttgaatcggcacttcgaattgttgacgtggaatggtttctttcaacttaccaacaatcgctttgcctcgttcaaaggcaaagtcacggtgcacgataaaactcaaggcatcaacggattcaccgttcaatagaatatccatcttcaccagatcactcgcacgatagccagtcacttcataatcgaatgaggcataacccttggtattggacttcaagtcatcgaagaaatcgaaaatgatttcagacagtggcatgttgtagatgacattaacccgataggtatctaagtaatccatcgtgacgaattcgccgcgtttacgttgtgcaagttccatcacagcccccacataatcgttcggtaccatgatagatgctttaacgtacggttctttaacttctgaaatatttgatgtttctggcatttctgatgggttatcaatcacttcttctgtgccgtcggttaaatcgacatgataatccactgatggtgcggtcatgatcaggtcaagattgaattcccgttcaagccgttcttgtacgacatccatatgcaagaggcctaagaagccacaacggaacccaaagcccaatgcttgtgacgattcaggttcgaattccaacgcggcatcatttaattgtaatttttcaagggcttcacgcaagtcgttaaacttcgcgttatccacgggatacatcccagaataaaccattggttgaatatgccgataaccatcaagggcttctgctgccggattgtcagcaagggtgaccgtatccccaacccgcgtatcttgaatggtcttgatgctggccgtaatataacccacatcaccaaccattaagaagtcgcgtttaacggctttaggcgacatcacaccgacttcagtgacttcgaattctttcccgttattcatcaagcgaatcttatcgccgactttaacagtgccatcaaaaacccgcacgtttaacacaacaccccgataactatcgtagatcgaatcaaaaatcagcgccttcaatggtgcttttaaatcacccgttggtgctggcacgtccgttaccagtttttctaggatttcttcaatcccaatcccgctcttagcactagcaagcacggcttctgaagcatccaaaccaatcatctcttcgatttctgctttaacaacgtctggttgtgcagatggtaaatcgattttattaatgacagggacgatttctaaatcatcgtcgaccgctaaataaacgttggctaacgtttgtgcttcaaccccttgggccgcatcgacgactaataaggcgccttcgcaagctgccaaacttcgtgacacttcgtatgaaaaatcgacgtgtccaggtgtatcgattaaatggaaaatataagtttcgccatctttggcatggtagtgtaattccaccgcgtttaacttgatggtaatcccacgttcacgttctaattccatgtcatctaagacttgcgcttgcatatcacgcttggcaatagtatccgtcatctcgagaatccgatcagctaatgttgatttaccatgatcaatatgcgcgatgatcgaaaaattacgaatgtgcttttgccggtctaacattcctgcgtaatccattaattgtacctacttcctctgactatcctttaaattataccaagcctgcctcgtaaaagcgaacgcatttaacggctttccaataaaaaagccaaaaccaaacggatgattttgacctttacttcattactaagtcctattttttgtcagctttttgcgccttttctttcttatctttattaggtgtcacttcactgacaaccttcttaactgtgccttcaattacatttttcaaactatctaatcgttcttcgtttgccatatcaatgacttcctttctattttgttcaccttcattctactttttaaccacaatgactgtcaaaaggttcgccttttattatctaaatgctataatttaggcaggcaaccaaatagattgttgcttaattaattgattggagttgacccatatgcaatttatcatgactttttcaaataacgaaaccgttactttttcggaaacggatttgctacatgcttggaagaatgatactacctatttaaacgttggtgatgatcaagccttttatctagatgaaatcttcaatggtagctaccaagacgccattgcaacttctagcgaacaacaactcgctaaagaacgtccaattcttgcattggctggtctattcgctgatgcagattggttaacttttgaaaccaatcctgaaaaatactatcaaacaaaagcaattgtttcactcacaaccaaagattaaccgctaaaagcctaggtacgcctaggctttttataattgctttcatattatgtacaatatacaatcgttaagaactgttattcattactttggaggttattatgtcctatttatttttagcgttcttggggagcgcactgatttcactactattctttaaccggcaacgacccagaaaatggcgtcgcgtactgattatcatcatcgccttaatcggcttaggcggttcattaatgccggtggctgctgcgaattccaagaagaccagccaacatcaagttgatgtacgcgaaaacaaggcggcccgtgctaactcgagcgctttaaaaaaacaactagctacaaagaaaacagaggctagccaactgacaaaacaagttgccagtcaatcacgacttgttaaaaagcagcaaaaagcgtctgagtcagaaagagtccgtgcggcttcagcctcaatcgccgctactagtcaagctagcgaggccgctcagcaacaggctgcaattcaggcaagccaacaagcacaacaagctgctagtgctcaacaagttgaacaaatggtgacaattgcccctaattctggtaaaaaataccatcttgatcccaattgccgtggcttaagtcgtgccaacagtactacaaccatgccattgtcacaagcacaagcagaaggctataccctttgcggatgggaggattagccaatgaaagcaacccgtttgataagtcgcgtggtggtaacaatttcacttgctggtgtcggaacccttttgcaacaaccaactaccgttcacgctaccaccttacgtcaagaaaccaagcgcattaatgcgcacaacaaaaaaaccgaacgtcaaattaatgcgcttcaacgtaaaattaaccagttaaacaaaaaactcactaactatcagcaacaaatgcaaacgactagtcctgagcgtcataacacatcagagctcgcggccctcacctaccgtggtgaaaacgaggtactcgtcaataataaccaaccaagcttcagtgctactgatttggctaccgatcacggtggttggcaaacctttagtaatctcgacgcactaaatcgcgttggtgctgcaaatgttcttttaaatcaatcgatgatgcctactgccaagcgcgaaggactcacttggaatccgaccggttggcataataagcggattaaatctggctggctgtataatcggagtcatttaatatgagcaatgaacttataaaatatgatcctgaacttaataccattccgttacgtaaattcacccctattgaaatgaatctatttttttcaattatttctcgtatgcgtgataagggagatcagacagttagattttcttttgaacaacttaaagatttgagcaactataaaccgactgcaaataatcgctttgaagatgatattcaaagaacttatgaaaagttaatgggacttcattttggaagacgtagtaaatctggattaaatagagaaatgtttgttatgtttactaaattcagaattgttggtgaaactgattctccttatatagacattgaagtatataaagatgctttgccacttcttaataatttagacacgtgggttagatatgctttagcggaatttagagatcttcgaagcagttatgctaaaaccgcttttagattgttaaaaggtttcagaacaaccggttatgcttttttatcaaaagaagatttttttgagttacttgatattcctaaaagttattggaaaaaaccgggagacgttgatagatacgttcttaaaccaatcagagaagaattgacccctctttttagaggcctaactgttcgaaagaaatatggtaaaggccgtggcaagccggttattggttactcatttacctggaaatcagaaaaaaagaacgcagacgacttctcacaagggcaatttcaagatgaaagacaaaagcttttcaatattcagcataatagtgaactaacagaacaggaaaaatggcgtgccattgataaagttaaggggttaactttaggctcaactgagaaacaagcggtggctgagaaacaagcggaacacgataaaaaaataagagatcaagcaagaaaagaagcacttgctgaactccgaaaggggtttggaaatcatgcctaaaactattagagaacttgctgatgaattgggcgtttcaaagcaggctatatggcaaaagataaaaagagatgcgtcaatcgatttacgtcaatttacatcaacaaaaggcaatactgtttacgttgatgttgatggtcaaaaagctattaaagcaatgttctcaaacaattcgtcaacaaggtaccgtcaacaaaaagatgatgttgacgacaacaaaaaagatgcggttgatgaacaagatgaagtgaaattccttcgaaatttagtatcagaaattcaatctgaaaagaaagagttacataagttactagatcagcaacaacggctagccttacaggacaaacaactgctcgaagaatacaaggcagaaattaaggacttgaaagccttaacgatggcaccacatgatgatggtgaaaaagaagtgacgtcagacaaacaaccggaacctgaaaatagcaccccggagtcacaacctaaacctaaaaagtggtggcgttttggtaaatagttacaactaaaaaagaaaagaagactagttaaatggcggaagataaatttgaacaagctgtaattgacaagctaaagagtgaaggttgggaatatctaacagattattctggtgtaacagttgatcggttatatgatcactggcgagatattctgaatgccaacaatcgtaaacgactagaagatacgccgttatctgataatgagtttgaacaagtgaagttggaactaacgaagaataaaacgccgtatgatgcgcaactcatgttggcgggtgcgggtggtgttgggaccgtaccgttgaatcgtgatgatgggacgcagctagaacttgaaatattctatggtgatgaagtggctggtggacattcacgttatgaagtcgttaaccaaattacgtttacggatttagcaacgagtctaagctctaagcgtcgaattgatatcatgttgctgattaacgggctacctgtggcccacattgaagaaaaagatgagtccctgcaaaaccagtggaatgcgtttgagcagttccaaaagtatgacggtgacggcatgtacacgggactcttttcttttgtgcaagtgcaattcgttctatcacaaaattcagcgcactattttgcacgaccaaagaatagtgactcatacaaccgtgacttcgcctttggctggcgtgatgatgccggcaaggatgtcacgaatacgatgacctttattcatgaggtgatgggtattccagctttacaccgcttagtaactgtgaatatgattccggatgcaaccaatgataacttaatggtcatgcgctcgtatcagattcaagcaacgcggcaaattttagatcgcatgcgtgaaatggatcaaaacgggttggttgaaaaagaagggggctacgtttggcacaccacgggttctggtaaaacagtcacctcatttaaagtggcgcaactactggcttcacgaccaagggttgaagatgttttgtttattgtggatcgggttgacttagtcaatcagacctatgaaaactttaagtcatttgcctataagacctttgaaaatcggattcaagtggtgaatgggagtgaactaaagcgtgctcttaagcacgataacacggcccatatctatttgattacggtacaaggcttggataaggccattaaatcaggtctagcctctaataagcggatggttattttaatggatgaggcccaccgatcagccagtggtgatgccgtcagccgaattaaacaagcgttaccgaaaaccacttggtttgggtttacagggacgcctaatttttatagcgatgaagtccatgacgtgaaaacctctaaggatatttcaacctatgatattttcgggccgcgtttacaccggtatacgattaaggatgctattggtgacggtaacgtccttgggtttgatgtgacgtattatgagactgattttgaacacgatctggatagtggtttaactgaaaaggaactggaaaaagaagtatatgccagtctgccattccgccaagccgttgtggcagatattcagcgtaattggactacgaatgctagcggaccaattaacatgggtgtccgcgagccgaatcaattccaaggtatgttagcggtatctggtaagcaagccgttgcttcttattacagtcttttcaagcaactagcacctgagttacgtgttgctatgacctattcgcgtgatgaagccaatgggacgggtgcatcagacttacaagctgctctaaagcaagcgatgcaagactacatgacgttctacggcacacgtaatttcttagaggacaaggatccacaacgggcgtacctcaatgatatgaccaagcgcattgcccgtaagaaaccttataacaagggtaatgatgccgatcgattggacttgattattgtgtcagatcaattattaacgggatttgattcaaaattcgttaatatcatctacatggataagattttgggtgaaggtcccctgattcaagcaatgtcacgaactaaccggacaattgataagacagctaaacctcatggtaaagtgcgtttttatcgtcaaggtgcggtaatggaagaaaaagtgaaggatgcgttggttatctataccaaagggggcaatgataccttagcggatgcggggaataccccggatgatcaggaacaaaaagagttgtttgatgaaggaattttggcgcctaaggcagctgataaaattgtcgacttgaacccccaaatcaagcgtttgcagcaattagcgggtgatgatttttcacagatgccgcgttctgaaaaagaacaagtcgagtttgccgtgacagccgcccaagttaactcgcaagtccaacaattagtgcaacaaggatatgtcttggggaactctgttgaaggaccagaaggacctatcacactaggcattgagagtgcaacgcagctcagctcattgcaagcacgcatgaacgatgtgaatgaagtcttaccagctgacaagcaagttgatttaacgaatatcaagctggtgttgcaatcctttgcgaatgaaattattgattacgataaactagtcgatttattgaatgcgtatatggatgaagtcagtgttgccaaccgtgcagccgttgaagagcatgtacagcccttagatcaagataatcgtgaagagattggacaagtcttagatggtatcgaacaaggggagtatacggagccttttacaactgaaacactcaagtcagtccgtaaggcgatccgcactgcgcaacaagacttaaaaatttacaagtgggcagccgaccatgattacaatggcaacgatattctagcagcttacgagctataccgtcccggtatttcattagttgataacacggcgctgaatcaatatttacaagacttagagagtcacttggacattggcttctttgagctagctgactttgaagagtcgctactgaactactttgctaaaattaccaaaaaataaattattcatcatagaaaagggctaaacatggcattaacagcagataaacaagcattaatttggaaaacattgaacgagactcgcggtaagattgaaccttctgaatataagaactacgtttttggtttgatgttctataagttcttatctgaaaaggcccaaacatggctggatagccagttgcgtggcgaaacttggtcatcagtttgggagcaaaacccagaaaaagcggcagcttttatgcaaaccaagttagggtatgtgattcaaccaggtgaactctttagtgactggcaagcagccattaacgtggatcaattcaacattaccaacgtggcagatgcgctagttcactttaaccaaggtattcaacaaggcgctaaggcaacttttgaaggcatttttgacgacatggacttggcttcaagccgtcttggtagcaatacgcaaacgcggacgaagaccttgatggattggattagtttgattgaccaaatcgaattggacgaagatgccgatgtactcggtgatctatacgaatacttaattgggatgtttgcggctaattcgggtgcgaaggccggcgagttctatacgccgcaccaagtgtcagatattatggcgcgtattttaacggctggccgtgaagagatgccaacttacagcctttatgacccagccatgggttccggttcattgcttttgacaactgcgtcatacatgaagaatgatggtattcgtggggccattaagtactacgggcaagaagttatcacgactacgtacaacttgggccggattaacttgatgatgcacggggtggagtataacgatatcaatatccataatgcggatactttgagttcagactggcctgatggggtccaaagtggggttgatagcccgcgtatgtttgatgccgtgatggccaaccctccttactcacttaagtgggataacactaaccgagaagatgacccgcgctttaaggcagggattgcgcccaagtcgaaggctgactttgcgttcttacaacacggcttgtaccacttgaagcaagatggccgtatggcgattgttttgccacacggggtgttgttccgtggtgccgccgaaggtcgtattcgccaagcattactcgaaagtcgcaatatttcagcggtgattgggttaccccaaaagatctttacgaatacggggattccaaccattattatgattttggaaaagaaccggacgactgatgatgtgctctttattgatgcttcaaagggctttgaaaagcagaagaataataacaagttgcgccaagaagacgtggacttaattgtggagacgttcttaaagcgtgaagacgttgctaagtatgcgcacgtggccagctttgacgagattaaggaaaatgacttcaacctcaacattccacgttatgtggacaccttcgaagaagaagatccagttgatttggtagctgttagccatgaactaggtgatattaatcgagatattgcgcaaagcgaggctgacttattagcaatgattagtgatttagcggtcacagatgatagcaaggtgattatcgaatcagctaagcaactattgggaggccatcatgagtaataaagtacctcaaattcgatttaacggttatagtgatgcttgggaagagcgtaggttatctgacgtagctaatcacagaggcggaacagctattgaaaagtattttgacaaagatggtgtatacaaagttatttcaattggtagctatggattaaatagccaatacgttgatcaaaatattcgcgcaatatcaaatgaaattacagatggacgagttgttaattctggagagctcaccatggtgctaaatgataaaactgctaatggaacaattattggaagatctttactggtagaaaaagataacgaatatgttatcaatcaacgaactgaaattatttcaccaaaagaaaattttgattctaattttgcatataccatacttaatggtccttttagagaaaaagttaaacgaattgttcaggggggaacgcaaatatatgttaactatcctgcagtttctaatctaaatctagaactacctaagattgaagagcaacaaaaaatcggttcattcttcaaacaactggatgatactatcgctcttcatcaacgtaagttagatttgttgaaagaacagaaaaaaggctacttgcaaaaaatgttccctaaaaatggtgaaaaagttcctgaattgcgatttgcggggtttgctgacgattgggaagagcgtaagttggagaaggtatttgacaccataacagattacgtggcaaatggaagttttgaatcgctgagaaaaaatgttaattcgtcagatattaacggatttgcttacctagtaaggcttcaagatgcttcaaataattggcaaggcccatggctgtataccgatcagcatgggtacgaatttttgaaaaaatctagactacagcctgatgatattataatggctaacgtcggtagtgttggaaagtttttcttagttccaaagttagacaagccgatgacattagcgcctaatgcagtgcttattaaatctagtgaaaatgaccaaggattcctatatcaaatgatgctcactccagaaatgcaatataagatttttgaaaaaactacacctggcgctcagtcaaaaatcaacaaaacagattttaagatgattgaaactcgactgcctaatatggatgaacaaaaaaaaatcggttcgttcttcaaacaattggatgacactatcgctcttcatcaacgtaagttagatttgttgaaagaacagaaaaaaggctttttacaaaatatgtttgtatagggtctataattaacaaataacccctcaaaatcattgttaaaataacccccaatatctataatgtagatgttgggggctatttgtttttatatggtataaatgacttcttttattcgtcattttttcgataccttttggaacgattttgaccaggaaataaacgatcatgcgatccgactcgaatgccaattaagactagttcatctgtatcaatcgtataaaccaccaggacatcgttagtttcgcttggtgttttgtttttcggggtatctcgtaagtgaaattcattataaccgctcattcgccgattaagctcatgatcttcaaattctggtggtaattgttgttgctcaagcaacaggtcaatggctgctcgaacttcatcaataatagatttgtctaaactggctaaccgttttagatcagcattaaaggttgcacgtggtttaaatctcagttttttcattatttaaactgaccccaataatcatcatctgattcaacaatttcatcgtcaggtaaaacatggcgtttaattaactgatcacgcgcaattgcatattctaacgaaccttctttcgcttttaatgctctttctagccagtccattttttcttgtgaaacgatggccactgcgcgactatttgaacgagcaatataaacggtttcatcttcgtcattaacttgatctaaatatttttttaggttagcgcgaaaatcgctctgtgttagtgctaatgtcatatttaccaccctttcattgtacttaatattgtactttaatttgtactaaaaatcaattttttaaggagctaaaactatgcaacaagttgtcttacccatcaaagattcaaacgttctcaaagaggttcaagataccttactcaacaactttaaagctggccggcgtaactataccgtttttcaagttggcaaagcgacactgttgcgagtcagtgatgtcatgcgcttaaaacaaaccgatatttttaatccggacggttctattaaacaaaatgcgtttattcatgaccgaaaaactggtaaaccgaataccttgtaccttaaacctgttcaaacagagctcttattgtaccgtcaatggctgcttgatcataagctggattctgaatggctctttccctcaattcaacaccccgagcgccatatcacggaaaaacagttctataaaatcatgagcaaagttggcgatcttttaagcattaattatctagggacccacactatgcgcaaaactggggcttatcgcgtttatacgcaatccaattacaatattggcctagtcatgcacttactaaatcattccagtgaagccatgactttagcttatttaggcttagaccaggctagtaccgaaagtatgttagatcaaattgattttggttagttttctttgagtttttagttgttgccgaaggcaacttctgagacatattttaagcacaaacaccagcaattttaattgtggtgtataagtgcgcattaaactcatttcattccgtttaatgacgctaaaaaatagctaacttgatcattaaaataaaaggttttttttagttcaatgcgcacttacacgtcaactaactttgacgtgtttcgataccccaaaaattgtattagatttcgctgcgctcaaacaaatctttttaattgctttacaccgtttttctttctaaacttaatcacaatctttgaataactaactataaaaagatgcctttaatttaaacctgaaataattagctaatgttaggagtaactcagatggacgaaaagaaagtattaaagccaattgatgaaatgcttgctgatccttggcaagttgatattcaagaattgtttgaagcttctgtcaatgaacctgacgagattaaaaagaatttgtatgattccttatacacttatattttgcaaaaaagacaagaagatattattaatcgtcctggcttcgttatttagccctctaagagccttctgagggctttttatttttcctttggtataaatgtatatgaatagtcttaaaattgctagaaacgaaaaataaggccctaaaaaacgaacatagcagttaaatctttatcaagttttagaaaagctaactatttgctgtcaatggtagcggacgagcgtagcgtgggagcataaggaattgacagctctaaaccagtcttaacactgaattggcgaaagccaaagtttctataaaactttgctttcctgcctaacggcgagtgaaaaagcagtcaagctggctcactcctttgtgttttttgattctaggttttgatctcgtacagtagtgcctcttatatacctcttttataaacctcttttaaacctcttttagacccctttttagtcttactctcccaaggcttatagaagtttatcaacgaggttttgtctgtttatcaacgaggttttgtctgtttatcaacgaggttttgtctgtttatcaacgaggttttgtctgtttatcaacgaggtttttaatggtgatcgttgataaacaatcgttgattttatataatagttgtggaggtgtgatttacccctacaccgtttttcttgataattagttctttagcaactaaattatctaaggctttccgaattgttgtccgacttgcaccaaataattgctgtaattcagcttcacttggcatcaacatcccacttttaaattcgctacgctgaatgcgagtttcgatttcgtctgaaatggtttcaaataagtattgtttcatcacaaatcaccatcctcacgataatcaaaaatatttttcgcatctaatcggtaacgaatttgattcccaatcagatactggacactatattcaaccggctcatcatcatgatcgtaagccaagcttgttacaatatataatggtgtcttctctggtatttctaatatgatagcctgtttcttatcggcatatcctgctttaatcgtttcatgcccgtagcctaagaccaccccatattgatccttcagtgtttgataaagggaccgattctgaaaagagatctgctcaatttctggaaagcgttcttgacttaaaaaagctaattcgtacgaaatgggtttcccattaatcattcgtttccgcggtagttcaaatacatgatctgccttcaaaaatcgaacaacatcttcttcgactggttcttcggtttgtaagacctcggtttgaatttcgtctggatttaactccgttgacattgaactcattgccagcatgttaatcacatgcttattgttaactgtcattcccacacgtggctttttttcaattagtccttcattttggaggactgataacgagcgacgcattgctgttcgactgataccatatcgctcagccaattctctttccgaaagattagcgaaggctcctttttggatatcgtatcgcaatcgttcctcacccaatgttgcaggtgagatttctttatattccaaagcgatccttcctttctcactttctaaattaactgcaatttgctacttaaaagagttgcaactagaccttgctgaattagacgccaatattcagctaacaacagtcaataaccgctatgaactcgattatcctgaaggaatgtcttctaacgcgattctttttgaacttcggttcgcttacattattcgaacaaccagctttcaagtgatggacgcgctttttaaacatcattacaattcggttcaagccttggcagaagcaacaaatttttcgaccttatcagtgcaaaattgtattaaacaattacgcgtctatttcaacatcttctacgtcaccatttcatttagaggtaagcaaaacatcgttggcgatccgttaaacattcgcttgttgatgatttatacttatacatctatttatcgcggtagtgtgactcaggacttcgtgacgacacgttcccagtatccaaccgcgcttaaaccacatttaagtttttcgcagcatcatcagattgaagcactggaatcggtcacttattttgatctcattcaaaagaagtattcgatcaccttaaaccctgaacttcactaactatttgaagcaattaacaagactaatacgattacccttgaattaccaggcttacctgaacagactttgcttgatgaatcactgctgtttagctttttattgcgcattgccgttgctaattacgatacagacaccgaaaaaatcaaaattactgaggctattttggcattaaatactgattttacaaacgatgttaatcacctactattggacttctttgaaacctatcagctgaactacactaaaactagttttctgatttccttttattatttagtcattaccttcatttatctcacctatattactttcgatatcaccgactttgtgatgtttaatgacacggcctcaacgttcaaacaaatcgatattgattcttatcaagaaattgatcatttaaatcaatttttagctgaaaagaaggctcattacacaacattaccagcgaattcaacgggcactctattaagcgaaatgttcttctttttgctcgactacaatccccaaatcaaacccttaaacattaatatccaatacactaaaaatttctatgcagcgacgatgattaccaaaaatctacaaaatgtgttcaggtcttcaattgtgttcactgattagatcgaagacgcagacctcatcatctctgatcactacgaacatgacgagtctttaaacggacaattcttcttattcagaaataatttcgaaccagacgattgatccttattactgaagaacgtattagcgtatatttatacgaattcttttcataaacgactgaattaaaaaccaccgtactgctaaacagtacggtggtttttgcgttactgattttcaagttgttcttgcaaccattccagattaacttcatgatgccgtttagaattagtcatcatcttgataaacatcggttgcaagtcagccggattggctagtgccgcgtcaatcgcacggattttagcctgtgtctgttcgatttggctttttaacagcttatccatctgttccggtgtcacttgatccgtgaataatagtggtgtgtagaacggaaacgtaatcggcttattctggcgaccataatgggcaaattgttgctcaaaagccgttatgccagcggccgttaattgatagcgattcttttcccgcttatcgggcacgtcgtccgcgactttttcgatcagtgccttttctgccagctgctgcaagttatagtaaaacgagcccttcgtgaagttcacgaaaaaagcgtagtattggctttccatgtcagccaataattcgtaaccatacgcgcccggctttttctttagtaatcccagaattaaaaattgaatcatttactagtctccttgcccgttagctgtgcaataaagtcggcataactcatttgaccaaatgcaaaatcacgactcaatcggtacatcttttcctgctgtgattctgggcgttgatagagttggtctagttgaaccgcttcatctgcaaggacgtcaggaacatcttgatgctgttcgaaagcttggaaataacgaatcccaaaacgccgttgcgaggccgcgtcaatgtgaatcccatctgggttagccgttaattcggcagcgttgaccaaataactgtgtggatcttgcgcgacaacttgcgccatttcgcgattaatttcgttaaattccgtggcgctcgcgccgaaccctactttgcctaaaaaggctggcaattgacccgcaatgattggtaaatcaggttggcccaatgctgcacgtaaatgattgaagaccgccgtcaacttggccgcatacgtttgatagccaccatttaaactgtcactttcaccttgatgccataacaccccgattagctcactactttcttgtgcaaattttgcctcagtaatcgcgtgacgcatcaaaagttcgtcgctcgcccactcatcgatggtgctcccaccttccgcgcaggggattaaccccaattcttcatcaggatgagcttgcacccacgccgcagcaaatgacgcagccggcccaacacccgcaacctcccgatcaaaatgaatcggttcggccatcatttgccagcgcccattgcgcagcatcttcacgcgctcgtgccgcaatcccggcacatcttgaataaatccccgcccagccatattcgactgaccgactaataaaattgacttcatcataaaaatcctcctgaaactgatttttatagtatagtctaattagactatgaatgcaaaaagaaaccacaacttaattctaaattgtggtttcttcttaatccttcgtcaaattcaaatacaaactatattgcactggtttttcaagaattaaattcattgttacgactggatcaattttaccatctttaacaaccattgattcttgacgtaatgatttctgatcaatatcaacaagccctaaatagtagaaatcaatcccttcatcatcacttttcttcacaaatagtggcattttcaattcaccagacgcattcccttgaaccattgtttggacctctggtgactctattttccggggatgacgcgtgaacatacgcatcgtctgactattcaaaaactcatcttcatatttgatgccgtcatcgatatcttgcgatttcgcgtaagtaataaatagcggacaagttccataagccgttttgtagccataaattgttgacgtctggtctttttcccaacctaataaacgacaagcatccttacgggtatatttcttaccaatcgttaatggcactgtttgatcgtaaccatctgccttgaatagacctgtcgccaaaacatcatccacaagtaatttgaaaaacgaatttgtttgataagctgttttaatccgcccgtttagtcgatattgattattgtccaatgttacataggcatctcgcccatacttatcttgatcagccgctttaaaaaaactcaaactcaggattaatagcatcgaatccaatgtcttctgatccactctagcatttacttgctcgagggcctttttgaagtcaccaactgataccacaccatctttttcaaacaacaacttcaataataatagctcgtgaattcgcatcccattcaatagttctttagataacattcttaaaaccatatcttcgtcaatagatagatggacgtcctctttcatcttcaacaagaactggtaatagttgtcgtatttagcaaccagaactgagccatcaatcgaaccatgcgttgtaaaatcaaacaacaacggtactctgccaagacgtttcttcaaatcttgatagtcatcgcgtaactgcttcaattcagttaaattgctattattaatcgaatcgtaaactcgttgtttggcaacttctgtaaaattaatcgtcgacatcccgataatttggtccgtactcaacttactacgtagactatttttattccgtgaatggtcacctgttaaagcaatcggaatcaaatagttattcttgtagtttccgataaaatcaatcaccgtcacaaaatctttacgcggaaacttccgtaaaccccggcccagttgctggataaagataatactggattgcgtattccgcaacattaccacttgattgatacaaggaatgtcgatcccttcattgaaaatatcaaccgtcacaatatattgatacttaccagcttcaaagtcacgaatgacttgttctcgataatcaacactatcttcgccagtcaaagcaactgaaggatagcctttagcggtcataatccgcgccacttctttggcttcatctttccggctacaaaaaattaagccatggacctgatcacctgcataaccataatagttcaactgctgttcaacataatccattcgttcagaggaaaccaaattctgtaatggcgtcttctcctcaccaatttcgccgtttaattcgtaatctgttacaccaatataatgaaatggtgctaacatgtcttcttccagagcatcttgaaggcgaatttcgtaggctaaattgtaatcgaacaactcataaatattaaaatcatccgtccgttctggggttgccgtcattcctaataaaaattgtggcttaaagtaatcaatcacccgatgataactgctggcacctgacttgtgcgcttcatcgatcatgagatagtcgaattcttcagggtcaaactgcgacaatgtattttccttagctaacgtctgaatcgtcgcaaataaatatcgcgcatcccgctggttttcattaccagacaagatcccgtattccgaccaatcgccacctagtacttgatggaaactggctttggccttcttcaaaatttgttcacgatgcacaataaataagaacttcttcggattcacacgttggacatcaaacgcacccaaataagtcttcccagtcccagttgccgaaacaattaatgctttttgatgaccttcatgtcgtaggaaattcaacgacttcaatgcgtctttttgcatatgattaggcgtaatcacagtgtaatccgcggactcttcagcgacagcttcaatcggttcatttttctgccgattaaaaacaatcgtttgataatcagcttcataaccagcgatccaggctggcgttaatgctgctgcacgttgccattgctgttcgacctcattgataacctggtcagttaacgccgcattttcatacgaagtgatccttaagttccactcataattacgaatcaacgccgtttcagttaagttcgagctcccaataatcatcgattggtattcacccttgtcaaagatgtaccctttagcatggaatgaatccgattgttttaaaatccgcacttcaagattcgggattttcaacagttctttaaacaccttgggattattaaagcctaaataattagacgtcaaaatccggcccgtgacaccttttaaggcaaggtccgctaatttcggtttcaacatcgttaagaccgcttcagtaatgaaagccacggcaaaagtgaagcgctgacaagtcatcagttcttcatccaaatgcgtcttaacatgatcttctgacgtgttaaataataacttcggcaggtattcgtcctgagaaatgtagcgctctttatcaaccaatcccgctaaagctgaattttgtaattcagtctgtaaatccgtcataactgctccctacttgaacgttaattgactcaaatcttgtttttgaatggcttgcatagctgccacatctgccggtgcccaggttaattgattcaactcagattgatgacaccatttcatctggctgtgcgccactaaaccaaaactttcctttgtgaactgcgcataataaaccgttaaatgaacgttgccaaaatcgtattggtgcacatcagttacaactgctggcccaaccaaaatatcagcacccaactcttcttttagttcccgcaccaaagcagcttccggcgcctcatctggttcaatcttcccacccggaaattcccacaagtctccaagaatccgatctgtagcccgtttggtacatagaatttggttatccttgatgattgcagcaccaacgacatagatatctttcatgtagaacacctcgtataagcgatttaagtatttaagtatttaagtatttaagtatttaagtatttaagtatttactataaatatagcattattaattagtccaaccaataccacttaataaaatcactaaatacacatccagtaacaaatagaatataatttaattaacaatctataaaatgttattagggggagaatatacttgattaataaaaaaaattttgaggattatgaactactagaggatatccgaaaaaaattatggacggctgatggtaaaagtagagtatcaattatggtaggagctgggtttagtagaaatgccacaaaaatagatgatagcttaccgtctatggctctctgggataatttgcgtatagacttactacacgccttaggcgacaaggaaaagtataaagatatgacggtacttgagttaggcgatgtatatgaagaaagatttggaataattagtttagagaatctattaaagactaaaatccctgatgaaaattatgagcctaataccttatttgccgatcttttatctcttcccttttcagacatctacacaactaactatgatactttacttgaacgcgcctcaaagaacatcttcactcgacagtatcaaattattcatgatattcacgatattcctggatctacttctcccagaattgttaaacttcacggttctttcccttcaaacagaccttttgtcttttcacaaaaaagttacaatgagtatccaacaaaatccgccccatttgtaaacatggtccaacaatctataatggaaacaacaatgattttaataggtttttctggtgacgatccaaattttaaaaactggatagaatgggtttctaatgccctaggtgatcatcgtcctaaaatatttatgttagggctggatataaatgaatcaaaaggatttctatcacgacaaaatattactgtattagattttaagaatattttccaagatccagaaacaaaatattttcaattttttaaagagttatttaaatttctttctagtaaccctaaaattgatgaacgcaaatggccccataccgactatccatggtgtagtagaaccgaacctacatctgaagacttaatagccttattaaggaaaaatcgagaatcatatcccggctggctaattatgcctagcaagatatcaaatcgacaatggatgccacaaataatcgatagctatttcactcgtttggcgaacgaaactactttatccattaaagaaaatttagcatacgaaatagtatggctattaagaaattttcgaattccaatttctggatatcaacaagaatttcttgaatcactagttttaaatacccaaaactacacacctaatatcgttaatataatattatttctaatcagagaataccgattagatggcgttaacgactttctaaaatataccaaactactagccagtaaaccattgaattgtaatcaaagtaacgaattaagttatcagaaaattctatggtaccaagattcgctaagtgataatcaacttaaagaaaaaatagattcttggagtaatgatgagcagtctcttgatttccttattaaaaaggcctgtattctttttagtatcagtgaatttgatgaagcattgactatgctcaggaacgttcttcaaacagcacgccaattgcaatcgatcagtacaaataatttcttcgcccgatctgttgaaggagttgtcctaacacttctacaaaaatatgaaaacaaaccttctatcaagaactacttcaatcgtctaatagaattagaccaaagtttttgttctccctctactacaattgaatatatttcaaatttcaaaagagaaaaaatccccgatcctattgaatatactacaaacttcgatggtaaagaaataatttcccaccacatgggaagttatggcacatctgattttacggatgctttctttttaatgagtctctatgatgactataaaataggtattgataagagccatagaattgatattcttaagtatttatttataaactatccaaagtattctttgaaaaaagttttctatcttacgaaagaaaaagaattagatatttttttctcaaaagaacaagtatatgatttcaaagaggaccaaattaatagcttatatgacttcttaataaatacattagaaggtaagtcaattaaaagtacttcaatgatacttgatgtcttatttcgactttacactgttcttaatgatgatcaacgcaataatttagagaaaatcctattacgttcatattcatctgctgatctctggggatctcttggaacaaatgcacataaaacataatcaatgagtagttcaacagcgtaagttgaagccatgtcagaagctgagttttagaagagtatcaaatcaatgagtagttcaacttgcatgaaatcgtttgtgtagatgtttcggttttagaagagtatcaaatcaatgagtagttcaactttaacttggacgtattggcttaacccagtgttttagaagagtatcaaatcaatgagtagttcaacacgccgaagaatttgacaaggctaatccatgttttagaagagtatcaaatcaatgagtagttcaaccgtacttattacttaccggtggtgagattggttttagaagagtatcaaatcaatgagtagttcaactatcttctcggtgcttgttgccgatcgatagttttagaagagtatcaaatcaatgagtagttcaactcagttttttaaattaatttatgcaagttcgttttagaagagtatcaaatcaatgagtagttcaactgccgtttgggtatttagctttaatctccggttttagaagagtatcaaatcaatgagtagttcaacaatggttacaacaagctaacagcgatttaagttttagaagagtatcaaatcaatgagtagttcaacttttattcattattttttctccttgattttgttttagaagagtatcaaatcaatgagtagttcaactaatgttttcatcaaaatgacacagtcaatgttttagaagagtatcaaatcaatgagtagttcaacatgaatttaaagatacttttgtttcatacggttttagaagagtatcaaatcaatgagtagttcaactggcatttttaacaacagattatacagagagttttagaagagtatcaaatcaatgagtagttcaacccaacgcttgtagactcaagccttacaaccgttttagaagagtatcaaatcaatgagtagttcaactggataaacttgatagttttgttaagaattgttttagaagagtatcaaatcaatgagtagttcaacgtggctaatatcgacaagctagaagcagaagttttagaagagtatcaaatcaatgagtagttcaacaacggattttaccagcggttgtaggactcagttttagaagagtatcaaatcaatgagtagttcaaccttatgatttaaacattaagtcaacgccatgttttagaagagtatcaaatcaatgagtagttcaacctggctttgaggttaaagcgagcgagatttgttttagaagagtatcaaatcaatgagtagttcaacagcaaacgccagctggtatggctgcggtcggttttagaagagtatcaaatcaatgagtagttcaacatacgctgataaccaccagtcgccagttttgttttagaagagtatcaaatcaatgagtagttcaactattcttgaggcaatgtcgcaccagcagcagttttagaagagtatcaaatcaatgagtagttcaaccggtattgtggctgaccaaatggctcaacggttttagaagagtatcaaatcaatgagtaatattaacctatttcccgtgcgaatctattgaaaaagatcacgttgtccgcgtggtcttttttcatgcattcaagcattgaaaacagttctcaattagcatagaattaagagcgtataataattgctagaatgcgattcttggagggtcatctatgtctaaattagagattatcgatttgcacgtcggcatcgacggtaaggaaattttaaaaggtgttaacctggaaatgaacacgggtgaaattcacgcgatcatgggacctaacgggactgggaagtcgacgctttcggaaacgattatgggcaatcccaagtatgaggtactacaaggtcagatcaaactagatggccaaaatattttagaaatgccggttgatgaacgcgcccgtgcggggttatttttggcgatgcaatatcctgctgaaattcaaggggtaacgaacgctgaattcatgcgtgcggcgattaatgcacgtcgggctgaagatgatcagatttcagtgatggctttcttgaaaaaattagatcaacggatggcattcttggatatgacggaagaaatgtcagaacgttacttaaacgaaggattttctgggggtgaaaagaaacggaatgaaattctgcaattgatgatgattgaacccaaattcgccatcctagacgaaattgattccggacttgatattgatgccttgcaagtcgtttcaaaaggcgtgaacgaaatgcgcggggctgattttggctcattaatcatcacacattatcaacggctcttaaactacatcgtgccagattatgtgcacatcatgatgggtggcaaaatcgtcacgactggtgatgcgtcacttgcaaaacgtttggaagacgaaggttatgtcgggattcgtgacgaattaggcttggatatcaaactgactgacgacgaaagtaaatagggggcgattctgatgaagaaaacattagccatcacgcctgaacaaatcgcgtcattctcacaattgcatcaagaaccggcctggtttgctgaaatgcgtcaagcagcgtttgcgcaaattgagcaactcgaactgcctatctttgaaaaaattaactataaacattggccagtgatggcagcaaatgcgccaacagccgttaaatccgatttgagtttaatgccatctgcggcagcgaatctttcagctgatcaaccgtacgcagtacagattggtcagacaactgccaagttaaatttaccggcagaattggcagaacaaggtgtcatttttaccgacattttcaccgcgttacaagaacatcctgatttggtacaacaatactacatgcaagtcacagtgaaaccgaacgaggatcgcttaacggcttttcacacagctttgatgaacagtgggctcttcttgtatgtgccgaaaaatgtggtgattaagcaacccattacggcttattatgtacaggacagcactcaacccgctgattttattcatcacgtcctcgtagtagccgaacaaaacagtgaatttagttatcttgaaaatctccaaacagcgggtgaccacaagaacttagcaaatgttgtcgtggaagtgattgctaaagataacagtcacgttcatttttcagcggttgatgcctttggaaaatccgtgacgacttacttgaatcgccggggccacttgatgcgcgatgcgcggattgattgggcattgggatcaatgaatgatggcaatatcatcggtgactttgattctgatttagtgggtgctggatcacatgctgaaacgaaagtggtcgccatctcaactggtaaacagattcaagggattgatacgcgtgtgacgaatattgggccgcgttcaattgggcacatcttgcaacatggcgtcattttagaagatgcgacgttaacgtttaacgggatcgggcatattttaaaaggggctaagggtgccgatgcccaacaagaaaatcgcgtcttgatgttatcgcggacagcacgcggggatgcgaacccactcttattaattgatgaaaatgacgtgcaagctggccatgctgccagtgtcgggcgcgttgatgaacaacaaatgtattatttaatgagtcgcggtctttcaaaagaagtcgcgcaacgacttgtaattcgtggtttcttaggcgctgttctaagtgaaattccggataaaaatgtgcgccaacaattaacggacacgattgaaaggaagttaatcgatggtcaaccagttaaatgattatcggtgcgactttccgattttagaccaaatcgtcaatgatgaaccacttgtttatttagacaatgcggcgaccacccaaaaaccacaagccgtgattgaccggttggtggcttattaccaaaatgacaatgcgaacgtgcatcgtggtgtgcatactttagctgaacgagcaaccgcccagtatgaagccgcgcgcacgaaggtccaaaccttcatccatgccgctgcgagtgccgaagtgattttcacaaaagggacgacgcaaagtttgaactgggttgcaggcagtttcggcccaaccgtggttgaagccggcgatgaaatcgtgattagtgtgatggaacatcatagtaatctcgtgccgtggcaacaactggcgcagaaaacgggcgcgaaattgcgttacatcgacttattaccggatgggcaactcgatttagagtcagcacgccaggtgattgggcctaagacgaaaattgttagtttggcgcatgcttccaacgtacttggggttgtcaatccgattaaaacaattgcggctttagtccatgcacaaggcggttacatggtggtcgatggtgcacaagccgtgccgcacatgatggttgatgtgcaggcacttgatgcggacttttacgccttttcagggcataagatgcttggaccaaccggcattggtgtgctttatggcaagcaagcattacttgaacagatgccacccgtggaatacggcggcgagatgatcgactttgtgggcttacaatcttcaacgtttaaagaattaccgtggcgccttgaaggtggaacgccaaacattgcgggggcaattggcttaggggccgccattgattatttaacgcaaattgggatggatcatatccaagcccatgaacaagcgctagtcacaatggctttaccgcagctccaagcaatcgacggcctcacgatttatggcccacaagatgccgcccaacgcaccggtgtgattgcctttaatctcgacaatttacatccacatgatttagcgaccgccctcgatatggaaggcgttgccgtacgtgctggtcatcactgcgcacaaccgttgatgcaatggttgaacgttgccgcaaccgcacgcgctagtttttacctctacaataccgaagcggacgtgaaaacgttcgtgaccgccattcaagcagcaaaggagtttttccaaaatggcactctctaaattagataacttatatcggcaggtcattcttgaccattcgcaacatccgcatcatcatggtcacttgacgactgccgatcatgaaattgaattacgcaaccccacctgtggcgatgtgttacaacttgaactggtgctcgaagacgggcagattagtcagattgctttttcaggggaaggctgtacgattagccaggcttctgccagcatgatgaccgatgccgtgatgcataagacaccggcgcaagcggaggcgatgatcgaacgcttttcggatatgatgattggtgatcgtgacgaagactggtcattgttagaagatgccgcgattttacaaggggtgcaacaattccctgcgcggattaaatgcgcgactttagcttggaaggcgctccacaaagccttaaatagcgatgaccgacgtgcaacaaccggtcaaatgatgaaccacgtagaaacggaggaaactaacgaatgacagaagagacaacgatgccccaatttgaagagtacgactacggctttagcgacgatgtagagcccgtcttttcaactgggcgcggtttaacggaagacgttgtgcgcgccatctcgcgtgagaaaaaggaaccacaatggatgttagatttccgcttaaaatcatttcacgcttatgaaaaaatgccaatgccagatttcggaccggacttatccgatcttgatttagaacacatgttgtattatcaaaaggcaacggacaagcaataccgcgattgggaagatgttcccgacaaaatcaaagaaacgtttgatcgcttaggtgtgcctgaagccgaacgtaagtatttagcaggttccagtgcgcaatatgaatcagaagtggtttatcacaacatgcgtgaagaattcgaaaaacttgggatcatttttaccgatatggataccggtttacgcgaataccctgaaattgtgaaggaatacttcagtacgttggtcaaaccaactgataataaattctcagcgcttaactcggccgtttggtcaggtggcacgttcatctacgttccaaaaggcgtgcggacggatattccaatccaatcgtacttccggattaacgccgaaaattcaggtcaattcgaacggacattgattattgtcgatgaaggcgccagcgtgaactacgttgaaggctgtactgcaccaagctattcaagtgatagcttgcacgcagcggtcgttgaagtctttgtgaaacgggatggctattgccgttacacgaccattcaaaactggtcaaagaacgtttatagtttggaaactaaacgggcccaagccatggaaaatgcgacaatggaatgggtcgacgggaatctcggttcaaaaatgaccatgaaatacccaagtgtctacctcgatggtgaaggtgcacgggggacaatgctctcaatcgccgtcgccggcgaaggcgttgaccaagacagtggcgcgcggatgattcacgctgcaccgaatacgtcatcctcaatcgtttcaaaatcgattgccaaagatggcggggccgttgattaccgcgggactgttcgttttgaacgcgacagtgacggttcgtttgcccatgtcgaatgtgatacgattattatggatgaccgctccagctctgatacgattccgtacaacacaattctaaacggcaacgtctcaatggaacatgaagccaaagtctctaaaatttctgaagaacaactctattatctgatgagccgtggcatctcggaagccaaagcaaccgaaatgatcatcatgggcttcgtcgaaccattcaccaaggaactcccaatggaatacgcggtggaattgaatcgattgattagttatgaaatggaagggtctgtaggataataaaaaggctgtaaccccttaatataataggggttgcagcctttttaaaaataatagttatctgtgataacataataatagaagatattttaaaatggacttattaaattatagaggagattagatgcttgaaattcaaaagaaaattatatttgactctaacaggattacttttagtacttgttctgttcacaggaattgaaagctttttagaagtgaaatataactatattattccaagttatataccaactataggacttccaataatatttgtagcgattatactgggagtgtttaaagatacttatgatgaactagttttattcggtattaaacttagaaacacacaagtagccgctgacgaaattttagttaagtattccgaatttcaaaaaagcgtcggaatttttctgaaatttaatctagctgttctagaaaaagatggctcgtttgataatgtcacttcgtcagattcaatttcacaattcttatattcagctaaagaagtcagtaaagaattagatattgatgatttagacataaaaagactgagatcaataggaaagcaaaaattattttatgcttatgaatatgagttagagtcatactatcatttgccagttagaaattattttgaacttggaagtccagaatatgttgggggtagatatgatttaaacctactatcaattaactttcctgaaattaaaaaattgattgatgcaagtaatgattattcacgaaaagataagctaaaccatatatttaagcggatgaagaaggattttgaagaactgtagtcatattgaatcagacaaattattgtaaaacgtgaatagtgaaaatgttaccgtgaaagtgataagatgattatatataatgcttgtagaatagataacaagatagtttggagggatttgatgaaggactttgagattacattaccgaatcaagctcagattaccattgatgtaactgatacaactctttataattacgactttaccagttattcattagcgccactacaggctgctgcgggaatggtggtattagataaagtaaaacatactgtattttcgcatgtttccgaagcgcatcttttgaagcaattaatgacgaaaaaggatatagaatacattgctaagctatcaagtgaggcgaaagaaaaaattagaactggagaatggtcttttggtgtccgaaaaaagactaacgagttatatgcagttttaaaggataataaaactggtaagaataagagttttgtgacacttgaacccaaattaattgagaatttggggactctacctgaactttcggcaattcaaaaccaattagcagcgattactgagcaaattgatcaattaaatcaggttgttgaacgagttgaacaagggcaatataatgatcgctttgctggtttttttagtgcgcggcagcaagtgattgaaggattggtagctaaagatgaaatcttaaagcgagagctattgctagctgcagttaaaataagtaatgaaacaatcgctaaattaatgttttcaattcatcaagacgcagttgattttacaaatcttaaaataaaatcaaaagaatttaaacggattgatcaatttctacaaaatgaaattggctatttaaacgcaaccgttcaaattagtttaattgcttatagtgcacttggcgaagagcaatcattgttagcagcattgagcaattatcggtcgtttattaatcaagtgttattaaaagaagtaggcgaatcacagcacacagtggcgtggaaaattgataatgtacatccgggtaatgatggtcaatttaataaaatagctactgggattactacacaaatcgaggcattaattaataatgtccaaggaattgaagcggaggtagctgataatgggaaaattgaaaatgtgtaaaatgccaggatgcgagaaggaaagatatgaacctaaaatgttgttttgtggtgagcatgaacgtaaatttaaacagtttgtgagcaaatcaagtaaatcaattttgggaggagtcgcaacgttggcattagcatttattgctaaagttatggctgacaataaagggaagaaatgatatgtaacattaaatcgagttattctatccttatatacaaaatcttttccagtgttgtagggtggatccacatagataagcttcactttatttgaataagatttttgtaaaacttttaagacctcaagattgtcaccttcaatgtaaagattatcagtttcgtcccaattcaaggacttttccatatttggcttcaaagttgcaactgttggttgttgagctagttgcatagcctcctttttaccatgccagttaaattcatatttttcattgttttgttccacagcatcgcctagtacaagacgtaatttgtcaaaatcaatttttccctctgttaagacttcaggaaacattgttgataacttttgaatattttgttgtactaaatcagccgatttcccggacatttcttgaattttcttttccatcgtttcctcctagtagttacctatatattccaatttggctcggagcatattttttcaactttcgtgcttccttacgtgcatgttcttccaaccagaattcttcgtttctttcttgtttaggtttagtctctaaatatgcaagaccctcaccgcttgattgttgattaagcaacaaccattctaaaagttctttataactaagcaagtatccaacatcagatgtgagtcccttttcattatcaatacttgtaacagaaatcaaagacaccttctcactagggttatcactataatttaccaaccatagattaccattaatatgccttgaagcatcatataagttaataaacttttgcttattccaccaatatctgttggggtgagcattagcattcgttactgaccatttttgttttccagcttttttcttttcttcggaatcgttttttaaaaactcaatcacatcattattttcaacattaaataaatcaacatcaaaaaagtaagttgatacttcgcttaacgctggaatgatgatgtctcttccgttgtcatcctcgagcacgtcaaaatccaaatcttcaagctgattaagtatttctcaacgtaaggatctccaccagaaagtatgtcaccaaaaggctttgaagggttctttccatctttatttttcacattgtttttgtaagaataccatttgttgaaatcttggatattaccatctataatggtctctttatctccaaaagaatctcttcctgactgataaacaaccgctctatttttttcaatagaataataaactagataagtaatatcagcaatcttactcagtaaattaaacttttcaagagaataatggatcaaattagtcatctcactattgcagaactcatgaaaagctatttttccactttcaagctgtgcacaatcaaccgttagatatataaccaatgccctcctacaatccaaattttttcttcaaccaagcgacaataagtggggttaagataccaagaacatacgtacctacatactttaaaattccactaactttagttttcggtgaggctgcttctaaaagtttctcacctttttcagtaattttcacaaaagccattgaataaatagtgttgtcaccataagttggctttgtgatatagccttcacggtataagaaatttatctgattaatgatttcttccttatcaacattaggaatttcaatctcccactgtcctgggtctgttttaattttttcaagaatatttcttcttagatttgattctttcaaaagcatcccctcctaaatcgacaatatgtcgttataatcaataccaccagcgttcaaaatttcaatggaattcaacttctcactgtcatttgcaaagccggtatcttgcagcaccactaccacgttttcaagttcttcatccttgatgaactcgacaatcttcttggcagcatcacttgtaatgttttcacctaaaacgatgaataacgaaccaaacgcaatcttataaatatttgcatcacttacaacaaatttttcaattggcaacgtcaaccccaagccttgcttcaacatgatttcataaaccaaatcatcttcagttgaccccggtacaagattgtcttgaattgatccaagcattgtcaccaaatcttcaggttcagtgttccacttcttgagatttgatttttcaagttcaaagactttgaagccaatatcaagtttatcggctaattctggattttcaccaataatcttgtctccagctcgacggatacgctcttctgcaatttcagggatattcctaaagccatctttatatccatcagactttttgtcttcaattatttcaggtaattgaaccataataaattggcggttattgtcgtcttctgaattttgcttcatcaccgattctgcagtcgtagctgaacctgaaaagaaatcaagaataatatcattctcagttgttgttgattgaataatctgttttaacaaatccactggcttaggattatcaaaataagttgtcttcatttctaaattagaaacatccgttgaaccactcttaccgttatagtacagggaaggcacattttcatacatgttctcagataacagatatttttttcttggaattgttgtttcatcttttccaaaaattattaacttttgatccagtaacttgtccattgcatcatcagtatatcgccaacctttagtaggtactgcagttggtttcgctgtttctggatgaataagcggccgatgtgatcttgtttcaggtttatctggagcggccatacttaccggttgatagacattacctttctcatcaatttttgaatacgcacgttctccaccactaaaactatcctgagcattaacccactttcgatattcatcattagcatcactcaaggtaaagtcagcacctattttgtttattatttgtttcgctttgcgtaacataccttcagcatttttcttcaaacgtttaaactcattttttgaagaaaatatctctagtgatttagctacaacaatgacatactcatgctgcattgcaacaccttttgaatcacctttaggatttctcttatcccaaataattgtccccgctaggttattctcaccaaatagttctgaaactaacttttcaagattagatatctcatgctcgtctatactaataaacattaccccatcatcagtaagcaaacttctacctagttttaatcgggaatacatcatattaagccagtttgtatgataccgtccacttgtttcagcgttagtggaaagctttgtcccatcctcgtcaacttgaccggtgacctccaaataattcttaattgaatcagaaaaactgtcctgatacacaaaatcactacccgtgttgtatggtggatccaaatatatgagcttcactttattcgcataagacttctgcaaaatcttcagcacttcaagattatccccttcgatataaaggttctgtgtttcatcccagttctttgactttgccttatttggcttcaacgttgccaccgttggctgctgggccaactgcatcacctgtttcttaccattccaagtaaagttatagcgttctggtgctgtttcaacttcatcaccaagaattaaacgtaacttatcaaagtcaatttttttctcagttaatacttcaggaaataattccttcagtttttcaatgttttgttcagtgatatcaagcgaatgactagagacttcctctaatcgttcgttcgttcgttcgttcgttcgttcgtcataggctggtgttccttccttaacttatcaagcatatttactgattaattttgcttgaaagttcatcttttaattttttcagcttcatctgcatatcaattttgcgatttaactgacgttcctttttaatttggccacgcaaatcttcaatctgtttctttaatgcatcaagctggtctttttcttcaccattgatattgccaactgcttcaccatattgtgacttagccgtagctgtcgcaatctcatcccgaagtccatcataaaaagttttcagattctgccgtggtaaatcaatcagtgatatttgctgcaacacttcttccaagttttcatcttgataaaccggagatggatacacattcatcaacttcaaaaagcctgttgataacctctcaaagcgacccgtgtagatcgtaaaactatccggttcatcggtgaggataactaatggatatggaatcaggtgtgccaacattttatagattttagtcgagtcacctttatccttggttttcccataaagaaactgaatttcttgataaagttccttgtcgtcctcatacacagcaatatgtgtattgtcagttttcagacttgccaacatataaatgctttggacggaatcctgtaagaattgcttgtccgccatatttttcatatgtggatagatttgcgtttttggtagatttcgattgatgattgtagcacttggaaatttccaccatttgattatgtctttcgtttccaattcgctcacctacctaataatcaaaaatgaaattaactcaacatcatctaaatcatccaatagttcagtttggacgctagtaccaccaggtgaaaacaatgaacccatccctacttcatcttgcttacctcgaattgcttcaatcgctttactcaagatttcagaataggcactcatgtccttaccaccattcgtttcctcataaaactcatctacaagtggttggttgaccgtctttttaccgaccgtcagctttttaaagaagtccaacacttgcttggcgtacatgtagtttattttgactgttccatccattcgcatataaacaacaatgtacggcaagatactgttttcttgtcccaagtcattcgtctgctgcttcaaggtcaatatgacacccggttcagcttcagggaagttggttgtatccgtaattgcatacatgcctagcggcgcttcattcaacaacttctcatgctctttcaaagcattctgcaagtctgctttgaagtcattgaaggtcatgtcggtaatggaaattgccccattaacgtcttccaaatcaatgacttgagtttggagttgttccaactgtttcttacggtatttcaagtcgttcatttctttattagacttgatattcaataagtcatcttcaccggttgctgccgtatttaacatgaccatacgtcccttgacacgttgttccagattcagataagtatccaagtccacatttggccagaaatttactagttgaatctgtttattacgtgatccaatacggtcaatacgcccgaaacgttgaatgacacgcactggattccagtgaatatcgtagttaatcaagtaatctgcatcctgcaagttttgcccttcagagatggtatccgttgcaatcaacaaatcaatttcttcggttgcgttcggattgatctggtcacgcccttttgatatcggtgagaagttcgtcaagatatcactcatatcattgacggccacacctttcatggttgttttgttcggtgtagaaccacccgtcaccaacgcagaattcagaccataaagtctttttactttgtcagctaagttctcatagagatagttagccgtatctgcaaaggcagtaaagatgattactttcttgttgttgcaattaattggatgctcatacttatgcttgagaattttctccaagtccatcaacttatcatctttttccggtgttactcgatgcgtgacggtttgcaattctttcaacgtttcaagatcttcattaagagcttgggaccacttcaccaagtccatatcaccaatcaatattttagtttttgtccccactgcctgttcgtcaaaggcactttccaaatcctcatcatcaaaatcagtgatacttggcatttccacgttacccgcttgatgctctttgattttttcaaggatatcttcaaccccgccaaccattcggtcaagggttgatccaaacgaataaatggaactttccaatcgtttgaacaaattggcacgaatcaatttagccaaggcttgttcacggtcaacttgcctgaatgacgacttcccttcttttaccttggtgtcatacaattcttcgtagcgctttcttttagtcgagagcacatactgaagtggttggtacattgccatgttcaagtaaccgattgaatcataaacatcctgtaagtcagggaactgccctgatgcatcaatatttggtttcactgtcattggcttcaagcgttcagggaaatctcccaatgaagtcgtatcataatatttttcaatgtgtttccgactacgagcaatcgtcaacatatccagtaacttgaaataatccggattgaccttatcaagaaagctttgagtcgtccgttcagattcatccagttccatccattgattaaaagcttgttgtgctaaacgcagtgtcgtgtcaatatcatcaacaccatacttcgccaacgcgtccgttttgccttcagtgatgaaaccaatctgatttttcaagtcattcatttggttgttgattggtgtagctgaaagcatcaatacttttgtcttacgtcccttttgaatgatatcttccatcaagcgttgataacgtgttttggtttcacgattgacgctggtatcgttattacggaagttgtgggattcatcaatgacaaccaaatcaaaatcagaccacagaaaagtatccagcttgattccgtcactttcacctttataacggctaaggtcagtgtggttcaaaacagtgtagttaaagtagtcatccactaaaacatttcttacatcaggtcgtgtataaagtgtccagttatcccgtagtcgttttggagcgagaacgagcactcgtttacgttgcaactcaaaatatttgataacggccaaggctgagaaagttttacctaaaccaactgaatcagctagaatcgcaccgttgtatttttcaagcttacgaattaagcccatcacaccatctttttgaaattggtaaagcttattccaaattactgaatccttgaacctagaaccttctggcgcaatatcttgctcatccaattcactcaacttgtcatgaaaaatatggtaaagcgatacaaaataaatccattcaggtggattttcttgataaatggttctgactgtttcaagcaccttgtctgttacttcttttgactttttagggtcattccagacagcgtcaaagtcagcttttaaaccagctaagtgattaggttcaccaataattcccgtcattgaagaaacgttatttgactctgtaagtcctaagccatctgaagtaaatttgaacattgaaggaactaccacattaccttcaatatctgcttcattttcaatcagtagttcatccaaagcattttgatttggtcccagctgatgaacctttactttttcctcaatcaaccttgccgtttcacgagcaataaaagccgtgttcattttatttctgagcttaatttcatacttatttccagaaatatcttcttcactttgcgcaatttcataccgctttaaaaaactagtttcttccttctcaaagaaagatttcgtcagaaccaaacacaactcctttgaacgcttgatttccttttgtaatgcgtgaaaagcaaaaattgaaaatgcagcagtttgaatgctgattttcgaatgtttcgtcaccttttcactgattaaattttctagggtgttatcccccttgttatcaattaattttaattccatgagcgtctcccaaggctataattttaattctttattctgtgctgtattaagcagctaccacttcacaaatatccccaacatcacaattcagtgcgatgcaaattttagctagtgtctcagttgtcactgtgccactattatttaatttattgatggtgtattgactaagatcagccagttcagctaaatctttctttgacatgtctcggtcaattaataacttccacaattttttatagctcatcatcttatcacctattttctctacaatctgatatgccgataataaatatattatatcacgattgatatgaaattttacacaaaaatatagcgaacgcttaatcattttacgattgattagattttgataaatatttgtaggaacgtaaattttagggggtgtttaggggtgtcatagggtgttaattcaaaacctaggggtgttatatttttaccccccttggaaattatgcctgtatctcattgatgaaattcatcgtaaaataaaaggtagattgtaaaattaatccgaacgctgttcggacaaaaaagattttgaacggttgagaattttcaatcgttttttatttcggcccgttggtcaagtggttaagacaccgccctttcacggcggtatcatgggttcaaatcccgtacgggtcatcaataatgccggcttagctcagttggtagagcatcggtatcgtaaaccgagggtcacaggttcgactcctgcagccggcatcaatagcatgtttctaccaagtgctaatcgggataatcagcattgtactgacgttttgttagtataatgcttttttaatattcaatttgattgaaaagcaaccactaaaatagccagttacgaaaatcgtaactagctattacttattgttcatttgcccattgccataatagaatctgagtgcgtccagtcattttttcattggctaagatcgtctgtgcttcagcacgattaacccacagggtacttaaggcttcatccacttcaagtgtacggtctgtttgtttagcttgatcaagagtacagattgctagactaacggcgccatcagtaaggcctggtgaggaataacttggcgcaaagcaatgttcaacctcaataagagagtaacctgtttccgccattaactcacgggaaatggcttgtttaatcgactcagttggttcaactaaaccggcgggattaccatagacaaaatcattaaggggctgtctaaattgtttagtcagtaagacctgtgagtgattttgattgtagcagaacattgcaaccgctgaggcattagctggtcgttttaaagtctcgatggttaagttagagtcacgactgacaaaatgataaggcattaaatcgccgtgttcattttgatacattgcttcgtagtaagttagccaacgatcaggtcgtaatggaataagagatgttagtgtaaaagggttcatcggaatcagctcgctttctattagttcattgtactactgtttaaaggcaacaaaccagttttctaagaatatgttaggtatcatgagcattttctcatttaagaataagcattagtaattttgaatcataaaataacttattttaatgaaaaaatcagtgcaaacaatgcagttaatgttgaaaaaagaattgatttaagattaaaataagattataatagcccttatagattctaagcgaatgataagagacttcttgtatagatgagtcgattcaatttaataactatcaaattcttagtttccgtaataataaagttttaaagtggggtattacaatggaagagaaacaagaaaaaacattctttgggcaaccgcatgggctatcaacactgttcttcactgaaatgtgggaacggtttagctactacgggatgcgtgcaattctattattctatatgtattttgctttagataagggtggtcttggctttgacaagacgactgcaatgtctgtgatggcaatctatggttcgatggtttacctagccagcgttgttggtggttggttaagtgatcggatctgggggagcttcaaaaccgtcttcatcggtggtgtcttgattatgttaggccatattgccttagcaatgccgatgggtgcgacagctttatttatttcaattgctttgattgttgcagggactgggttattaaaacctaacgtttctgaaatggttggtagtttgtatagtgaaaatgatcgtcgccgtgatgctggtttcagtatgttcgtcttcgggattaacttgggctcatttgtcgctccaattcttgttggggctgtcggtcaaaaaattgattttcacttaggcttctcattagccgctgtcgggatgttctttggtttaatccaatactaccgcggtcgttctcaattcagtaaagaaaattcaaaacctaatgatccaattgcgccagaagaattatcaagcattattcgtaaaattgtgattggtgttgtggtcgtcgttgccgtagtattaggtatgcaatttacaggcaacttaaacattgataacatcgtcttgatgatttcaatcattgcgattgcattaccaattgtgtacttctcacggatgttgggcagcaagaaagtgactaagaaggaacgttcacgcgttatagcttatattccactctttattgcagctgctatcttctggggaattgaagaatctggctccgttgttctagccttatttgcagaagatcggacaattctaaacattggtgggcatagcttagctgcatcaaatttccaatcattgaatccactatttattatgcttctaacgccattctttgtatggttatggagtgcttggaagaaacaaccatctgcacctggcaagtttgctgttggtttaatcttcgctggtttatcatacatgtttatggcacttcctggattattacacggtaccgctggccgagttagcccattctggttaatcggttcatggttcatcgttgaaattgctgaaatgttaatttcaccaattgggttgtcaattacaacaaaattagcgccaaaggcattccaatcacaaatgatgagtatgtggttcttagcagatgctgcgggccaagcaattaatgcacagcttgtgcgtttatattcaccacaaacagaaattagatatttcttagggattgggattgtgagtgcgatcttcgggatcgtcttaatcttcttcgttaaaccaattcataagttaatggaaggcgttaactaaatattagaaaaaatcttgattatttatgcaataatcaagattttttttgcattttggggttgatttttctgtcagaattttgtaaactaatatagttgaatcgatgagatgaaacgtatggaggagtagcgaagtggctaaacgcggcggactgtaaatccgctccttcgggttcggtggttcgaatccactctcctccacttgattgggctatggccaagcggtaaggcaacaggttttgatcctgtcatgcgctggttcgaatccagctagcccaatactttagagacatcttgctaagatgtctttttttatgtcctggattgacttcctccgctcgttcggtatccttggataaataaaaaaaggggtggcagaatgaaaattggatttattggtgtcggtaacatggcacaagcaatgattaaagggttagtgaaagctgatcaaatcgcaacaacggatattttagtgcatggcggacatccggcgaactatgcggattttgtagctgaacaacggattacagctgttgcggataacaattcagtggttgaacaagccgacatcgtttttttagcggtaaaaccatatattgtgccacaggttttagcagaaacaaatgcagcctttaaagcacatcaaccattgatggtttcaatggcagcaggtttatcacttgataaattagcagaacaatctgctgcagatttaccaattctacgcatcatgccaaatgttaacgtggccaatcgcgcagggataacagctgttgttggtaacgaacaagtcaatgcagagcaattgggtcgggtgaaggatgtccttgcacaactggggggcgtggttgaaatcggcgaaaaagatttcacaactttcagtgcgcttgccggtagttcaccagcatttgtttacctattcattgattcaatggcgcgggccggcgttaaacacggtttaacaaagaaagccgcaaccgaaattgcagctcaagccgttttagggagtgcccaaaacgtgcttatgagtgatgattcaccttgggacttagtggatcaagtttcatcaccaggtggtacaaccgttgctggcttgttagcaatggaagaagccggcttaatgacagcggtggttaaaggcatcgacgcaacaattgcgaaggatttagaaagccaaaaatagagtgctctcaagcatgtaaaaagcgtaacctgatacaaatactgtattgggttacgcttttttatattattttgtaaagtggaccatctcatgacagagttggtgggtgagtaagctactttctagtgggataggatttgcgccgttagtttcaagggcagtaataaacgcatcaatcattggcgcaaagccccgcgtttcaagcgtaggcgtccagtcagctgcagtttgaatacgactgtcttctgccgcttgtgttgtgtagcgcgttagattatcgacagtgaataacccgtgtggtgtctggagacttgcaatttcttgattggtaccactttgcatatttaaagtcgcgctgattaattggcgcggtgtttcaatggttaattgcgcgagttgtaaattgccgtttgcatcctgctgacagtatggacggattttgtaattggtacctagtgaatcagccaagaaaagcgccgtatcaatggtatgaatcatcaggtcataaatggcaaagggcgttggttggctcgttgccacgcgtgttttagtgatgttgatcagttgtttatcgggtaagtgatttaatttttgcaaaaatggggcaaaacggcggttgaagccgaccgttaagagccgttctttgctagccgcgagtttgtataattcggcgacttccagtggattttcacttaagggtttatcgacaaaaacgtgtaaaccatggagcaaggcctgtttaacatattgatagtgggttgcagttggggtgtgaatgaaaactgcgtcgagtggttgttcgagtaatgtgtcaaatgataggcagccactttctaaatgatattgcgcttgaagctgcgctaatttagccggttggcgcgtacataagacccaatcgacccggtcttgcatctgcgccattacaggtaaatatgctttttgtgcaatgtttcctagtccaataacaccgatttttaacatcgttaaactccttaatatgaatggataaatatagtatagcaaattaacaagaaaacggttcaaagtttagtcggaatcccttgttattttggtctataccatttatactagaggtaatttaaagatagaggtggatggataatggcagtaaaagtattaaaacatgcggtaatctatacaggtgacgacgttatcgaagacggttatattcgtttcgatgataaaattttggcagtgggcccaatgttcgactacaaggcacaagctggcgaagaaattcaagacgttaaaggcaagacaatcattcctggctttattgacgttcactgtcacggtggttatggttttgatgcaatggacggcgatgctgaccaaatcgacgaaatggcaactaagatgatgcaaaatgaaggggtcacaaccttatttgcaacaacgatgacgcaatcaaacgaaaacattgctaatgctatgcgcggtgttaaagcagcggctgaaaagaacccattaattcaaggtgttcatttggaaggcccattcatcgcaccaatcttcaagggtgctcaaccagaacaattcattaaagatccagacgttgacttattggacgaatggaataagttatcaggtaaccgcgtgcgtttaattacttatgcaccagaagatcctggttcaaaagcattcgaagactactgcttagcacacaacatcgtgccttcagttggtcatagtaatgcaacgcgtgaacaaatgcttgaaagtaaagcaacgcacgttacccatttatacaatgcccaacgtgaattcaagcaccgcgaacctggtgttacaggtcacgcaatgttagaagacaacatgtacgctgaattaatcgctgatggtttccatatcgtgcctgacatgattaaattagcttacgaacaaaaaggtgcagaacggatcgaccttgtgactgattcaatgcgggctaaagggattgctgaaggcgaaagtgaattaggcggccaaaaagtcattgttaaagacaaacaagctcgcttagaagatggcactttagccggatcagtgttaacatatatcgatgccttcaagaacatccaaacattcacaggttgtgaaacgtttgaagccgttatgatgtcaagtgtcaaccaagccgaagaatttggcttaacacaaaaaggtaaattagaagaaggtcgggatgctgatttcaacatcttagatcatcaacaaaacttagtcgcaacttacagctttgggaacggctatcaacattaatatttaggagtgtgtcccatggaatcacctgtttatattcaaattcataatcaactcaaaaaggatattgaagccggcaagtggtcgattggagatcgaattccttcagaacgggagcttgctttaaatttcgaagtgtcgcgaatgacgttacgacaagccgttcaaacattagtcgacgaaggaattttggaacgccgcatcggggccgggacatatgtcgctaaccaaaaggtgcaagaaaaaatgtccggcgtcactagttttaccgatctaatgactgcccaaggtaagcagccatctagtaaaaccatttcgttccacattgccaacccatcacttagcgaagctgaaaagctccagttaaaagatggcgagcaggtgctccgcatggaacggattcgctatgccgacaatgtgcccatctgttttgaagtggcaaccgtgccacaaagcttagttgcagatttcagtaaagctgaaatcacgtcttccttctataaagcattagccgaaaaagggggctacgaaatgggcggcgcacaacaaaccgtctcagcccaactcgcctcagaacgaattgccgaatatctcgacattaagcgtaatggtccaatcttgaaattacgacaagtttccttcttatcaaacggcgaacctttcgagtatgtccgcacccaatatgtgggcgaacgatttgaattttatttggaaagataactacggaaaagcacaagatgttacccattaaatcggggtgcattttgtgctttttttgggtataattagactgaaaataaattggtagataaaaaaaggtgactgaatggttaaagttattaagaaaaataataaattaataggtattatcattttattcgttgtactaagtattttttatacttatttgatggcaccccagcatacattaattgctcgcgatagtttagatggttattttcatctgaatcgcgctttatcattaagacatatttggtattctccaatcaattttaatgattggggcggtgttggaaatgccacagcattattctatccatggttgacaatttacccgatgcatttattgacagtaatattcggaccggtgtctggatttttactatttctaaccttagtaacttttttaacactagtttctagttatatatcagcaattaaattctcaggggaacagttatttggcatattatttgcattgatttatactttttctttcattcgtaattctagtgtaatgtaccgttgggggttaggtgaatacattgcttacatatttataccgccgttatttttgtgcttttataatttattacgacaacagccaaaacagttacgttgggtgattattttctttagtcttattttgtattctcatgtactttctattgtaacgactagttttggtttatgctgtgttttattcagctttttagttcaaaaaaaatttaaaaatttgtccgaaaattcggattaaatttgcaatctaccaattttatattatttcatccggcaacttgacaggaccctagtacatagcttgagtggtggttctttttttattttagacattagttcatttaattaggaattcagatagggaaatatactgaaatgaacgtaactgataaagtcggtcaagagtggcaatttatactaatttttgaaattacagataaagaagctaatcagggcaccgttgatttgaagaaagcaattaactgaggtgtcttactttaattgcctagcttgtttagttgacccgcttgtctagaaatgttaaattgattctattcaataaaggcgttgattgttgggaggcgatgaaagtggatgaacgcattacagaataccgggatgcggtttatgagcaggtggtcaaagtcgggaagtcgttagggaacgtgacgcgtctacaactgttgaacattcttgcgcaaggccccaaaacggtggaagtcttagccagtacagtcggcttaagtgtcgctaccgtttcacggaacctgcaaattttgaaacaaacaaacttagtggcgattgaacgcgagaagaattttgttacttatcgtttaaattcagaacgggtcaaacaattggtaaccctcttggttgatgtctgcgaagaaactttgccagagatgacgattttggaaaaaacactcgcgcaagaaacaggtgcccccgaagcgttaactggtgacgcattgaaaacgaaattaatggcagacgatgtgtgtttgattgatttgcgtcccgcagatgagtttgcaagtcaacacttaccaggggcacgcaatgtgccatatgatcagttggatcaacgattagctgagctccccaaggataaagaagtggtggtttattgtcgtggtcgtctatgtgcttacgccaatgttgccagtcaacaactacaagctgctgggtttaaagtggcaacgtttaatcaatcagtgtgggaatggtcgcgagttatgaccgaaacggaataagatgaagcgtcctttttgacggcacgtcccaatggtggtatactatgagtaattcaatgaaatcgttgaatgattttcttgaaaagaaaggtgattgcaatggcaacacaaattctaactgaagcaaactttaaagatgaagttcaagaaggggtcacattagtcgatttctgggcaacatggtgcccaccatgtcggatgcaaggcccaattgtcgaagaactagccgacgattacgcgggtaaagctaaaatcgccaaagttgacgttgatcacaaccaaaacttggcggctgaattcggcatccaatcaattccaaccttgttggtcatgaaagatggccaattagtgcaacaaatggttgggttacaacggaaagaaacattagcacaagaaatcaatactgccttagcttaaaaatagcttgaaggcgtatcacgattaaataataacatcatccgataagctcttaagtagggcatatattaggtgatgtttttttgtgttgttattttaagtaatccagcataacggctttaaagaagtcgatgtgtttgaggtacatttcttcatcaacatattcgtcaatcatgtggctagtatcattgccggggccgacaactgccactggtaagtcaggattgtgcttagcaaggtgggcggcgtcggtaccgccagcaacgtgcatcagtggataagcttgggataacttttgtgccccgattttttgaacagcttgaatgaatggtgcttgtggattgctcttaacgggtggttggttattaatgacggtcaattccagattcatgtctgcctgttgattgagttccgcaatgatggtattgaggtcagcaatcacttggtcgccagttaaggcgggggttgtacgaacccgacaagtaagttctgcgtgaccggggaccgaattaatttgttcaccaccgttgattaaggttgtgacaggcacgatatcgccgaggacatcatcaataggatgtttctgatcgaagtattgtttttgccgattgtggtaggcaagcaaatgatcaattgcgttaataccgagtgcgggcattgaactgtgcgcggttttaccagttgccgtcactttaaaatcaagggaaccattatgggcgaaaattaagaaatgttgttcattggtttgattagccgcaaggagtttttgggccatttctgtggggaatttgtcggggttatttgccaaggcttgtttatcaacgccagatggttcggcaactaataaggctgttaaatcatcggcatagccttgagcggttaaagtttgcgcaccagtttcgttcttttcttcatcgacggttgcgagtagtttgatttggccgtttaaaggaacatgttcatcgtgtaattcgatcattgcaatcacaagcgcagccagaccagacttcatgtcggttgcgcctcgaccgaagagtttaccatcgcgagcggttgaagggatcactcgtccatttgctgcgatcaccgatgctgacgacgtccatatgaccagtgacaccgaggaatttgtcggttgcttcgcctagataggccactaagttttcgcggcctggtttagaagccactttttcagtatggataccatgttgtgcgaatagatcggctaagtagtcggcaatcacaccttctgcttggtctgttgtatcaattgagaccagtttttctaaaattgcgattttttcagttttttccatcatcaaaagacctccagataagattcaatatgcattatagagcccctattttgggaaagtaacggacataaattaagcaatttcgcaaatcaagtgggttaaaaaagccgtcacgcttagcgtggcggctttttgttggtctggttggtgagggcttctttaaaagcctgaccggcgcggtttattcgttaaaccagtgcatatcaaacagaacgcatggattggtgccggcgcaacgattttaccgggggtgacggtcggtgagaatgcgattgtcgctgctaacgccacggtcaccaaagatgtaccagacaatatgattgttgccggaacgctagcgaaagtcatgcgtcaaatcaaattagaaaaggagttttaacatgtcaattcaaaataaagtcgtgatcattacaggtgcctcatcagggattggggcagcaactgccaaattattagcaagcaaaggggctaaggttgttttagcagctcgtcgtgaagatcgtttacaagctttagcatcagaaatcggtgcaaatgcgatttatcaagcaacggatgtgactaatcgggatcaaatggcgagcttagtccaattggcgcttgatcatttcggtcgcgtagatgttttatacaacaatgccggcgtcatgccacaaggaaacctgagcgaacgcgattatgatcaatggcaaaagatgctcgatatcaacatcatgggcgttttaaacgggatcggtgcggtcttaccaacgatgcaagcccaacaagatggtttgattatttcaactgattcggttgccggacatgtggtttatccagcttctgccgtttataacgggactaaatatgcagtgcgtgctattatggaaggcttacgccaagaagaaaaagataacggcattcgttcaacaattgtttcaccaggggctgttaaaacagaattggtgaatacgattggcaaccctgctgttttcgaaggggttaagcaattaatggatgcaccagaagaatcagcgttggccctcaatccagaagacattgccaacgcagtcttatatgcgattgaccaaccaaaacatgtagtggtcagtgaagtcttaattcgcccaactaaacaacaagtttaagaaaagtggtcgactaagcgggtagtgcgtgcgggattagcctaagcaggcgaataactgatgcagtcagtggtttgactgatgtagctaaacataaggcattgcttcgacgagcgcgtttcaaaatggtatttagtaactgagcataaaaatcaccttaatctgttttttaagattaaggtgattttttttaattaagtacaaccaggttggtaatcaaaatgtgaaatggatgacaacagcttttttaggctaaaagtcgtataatgacagtattctaaatgaaattggagatcataatatggcagaattgatgcgtttttatcaaagctttcaaccggaacattatcaagtttttctagatattaatcgggctcaaaaacaatttaggggtcggacgacaattacggggactgctaaagaagcacttgttttaattcatcagaacggtttagtgattgaaacagtgacggctgcaggtaagagtgtgccgtttacagttgataatgacgcaaatgccttgaaagtcgaagtcggccaacctggcgaagtgactttggtaattgcctatactgccgctttaacggattcaatgatgggcatctatccttcttattatcaagtcgatggggtgcaaaaagaattaatcggcacgcaatttgaaaccaattttgcgcggcaagctttcccatgtattgatgaaccagaagccaaagcgacttttgatttagcggttaaattcgatgagcacgaaggcgaaacgattctgagcaacatgcctgaaaaagaagtcatcgatggcgttcaccactttgaaacaacggtccggatgtcaacgtaccttgtggcctttgcttttggtgaattgcaaggggttcaaaccaaaacggagagcggcgtgcaagttggcgtctttgctactaaggcacatcaagcaaacgagctcgattttgcattggacattgctaaacggtcaatcgaattctttgaagacttctaccaaacaccctatccattaccccattcatggcagttggcattgccagacttttcggccggcgcgatggaaaactggggcttagtcacttatcgggaagcttatttattactcgatcctgataatactgccttggatacgaaacaccgcgttgcgactgtgattgcgcatgaattagcacaccaatggtttggtgatttagtaacgatgcaatggtgggacgatctttggttgaacgaaagttttgccaatatgatggaatacgtcgcaatcgatgcgttgcagccggactggcatatttgggaaagtttccaaacctcggaagcagcggcagccttacaacgtgacgcgactgatggggtccaatcggtgcatgtgcaagtcaataatccagccgaaatcgatgcgttatttgatggcgcaatcgtgtatgccaaaggcgcccggatgctcgtgatggttcgcgctttaatcggtgacgatgctctacgcgctggtttgaaagcttattttgcagcacatcaattcggaaatgcgactggcgctgacttgtgggcagcactggggaaagccgctaacttagatgttggggccattatgcattcatggctcgaacaaccaggttatccagtgttaacggccaaagtcgttgacggacaattaacgcttaaccaacaacaattctttatcggtgagggtcaagaagttgggcgtcaatggcagattccattgaagagcaactatgcggcagccccattattgatgactgaccgtgaattggtactcggtgattatgctcaattacgcgccgacaatgggcaaccattccgcttaaacgtggggaacgaatcgcatttcattgttcattacgatcaaacattattagatgatattttaaatagtagtgctgacatggcaccaattggacaactgcaactactgcaagacttacgcttattagctgaaggacgtcaaatttcgtacgcagatgttgtgcctgttttagcaccttttgccaagagtgattcaaatgtcgtggcagatgccctttacacggttgctggtaacttgaagaaatttgtgacacctggtgaagaaagtgaacaacacctgcgtcgattcttcgaccaattgagtaaagcgcaagttgcgcgcttaggttggctggttcaaccgactgatagcaatgacgatcagttaatgcgcccaactgttttaagcgcagccttgtatgctaaaaaccaagcagccattgatgtagcccatactttattccaagcgaaccaagaaaaactggtcaccttaccagccgcaattcgggtactggtcttgatgaatgaggtccaaaacttcgggaatgccgcactttatgatcagctcttagcagcttatcgccaaacgagtgatgcgagctataagaatgatttgactgcggccttaacgcgcacgactgatcctgaattaattgcgaccttaattggaaaatttgaagatgccagcaccatcaaaccacaagatttgcgggcttggttccgcggattactcgccaacgacaagagccaacaagcaacctgggattggattcgcaacgattggcaatggctagaagagacagtcggcggtgatatggaatttacaacgtatatcacctcgattgccgcaatctttaagaccccagaacggttggcagagttcaaagccttctttgaacctaagctcaacaccccaggcttaacccgggaaattacgatggacattaaagtcatcgaaagtcgggttgcattgattgaagatcaaaaagcagcggttaatgaaacaattgccaaacatatgtagtcgaacgttgtgcaagttaaattcaatttgaggagttttgagatgacgattaaattagtcgcgattgatattgatgatacattattgagttcacagcaccaactgctagccagtacgaaataacaagttgctaaggccctggaacagggtgtgaaagtcgttttgtgttccggacgcccattagctggcgtggtgccctttttaaatcaactagggattgccggtgataatcaatacgtgattacgtttaacggcagtattatcgaaacggcgtctggtaaaatcttgaaagaagctggcatcagccgagaaacctaccaagcgattgatgactactcgcaagcaacgggcttaccgtataatgtgctcgatcaaaatagtgtgatttatacgagtaatgtgaatgttgcaccaatgacggtggtgcaagcttgggaaaacgaagctggtattcatattcgcaaaccgaatgaaatcgacgcggccacgcagatggtcaaagcggtctttacagggactagcgaacagttagatgtacatgaaccacaggtacacgcgcaatttggaactgataattatgttgttcgtgcagctgacctctttttagaagtgatgcacgctgatgttaataaaggcaaagcagtgcaatacctcgcgaataaacttggatttgcgccggatgaaatcatggcgattggcgatgagaaaaatgacatcccaatgttccaatttgccggtactgcggtggcaatgggcaacggttcagctggttgaacatcttagagcgattaaagcactataataaataaaaactatccacaacctgattgggaagggtgtggatagtttttttgtggaaacgtgctttttaattgcaacaccttccgcttaatctaaaatgagccttaatctcaaaagacgagattgaggctcatttttaattaatactcagaggcaaatcgctttaacagcactctatgctttgtcgaagtagattgttgcgattgtgcctaggatgatcatagcgatgatgagtgcgatgggtcctagtagtgctgtggcggttgttagggctggccaggctggtgcgacgccggtttgggcaagaatccagatggcggcaatgacaacgccgagcacaccggcgtaaacgtattcgacgaagtgtgctaataggtagtgcattaatttagcaacaatcacagttccgatgacggccccaatgatgaacggtaagaggagcgcgacgcttttgaacgcttctgtggcttgtgtcaagcgtcctgtgacgaggtagaccattaagtcgagtagttgactgacagcgtgataaacagtgccatattgcttcacaatcatgatcatgattgacccagagacgcctgggatgagcatgagtgatactgagaagaagccggcaaatagtaacgtgccaaagtcttggagggtagtgagttgtttgatagcgatgtcggattcagattggtgaccaccaatctgggtgagtagtagcataattgcgccacagacgatggcgattaacactttttgccagttgagtccggcgagtctacgccagatgaatgggagactgccgacgacaagaccgatgaagaaactgtatgccgctagtggataagcggtgcataaccaaagaatgattttggtggagagtaagacgccgatcccagcgccaatcccgattggccataaaaagccaattgcttggcgccaatcttttttgaattgcgcgatagccgccagaagcggttcgtatagaccaacgataacggcgaaaatgctgccggatagaccaggtattacgagtgcgacgccgattagggcgcctttgagtgcgttaataagtggcataagcggttctcctttttatatgaggggacttttatttggtgggaattgtaacgggtgttgaaggtaatgggacaccagcttcattcaaggcttgcaagtaagcctgtaagaaagtacggttagtggcagcttgttcgccgttagtggtgtgcataacaatctggtaagcaaggacaccatctgcgagggtggttaccccgagaatcgtagggccatcttgtatttcaggatgtttgggcaccagttgcacattgacttcattgacggttgccgctaacagttgtaagtcggtgtcgggtaagatgcgaatgttaatcagaacacgcatatcattgcgggataggttgctgacgatcgagatattgcggttaggaatgaaatttaaggtgccatcgtaactttgaacttgtgtggttcgtaagccaatcgcgttgacggtaccttctaccgtaccaattttaaccatatcacccacatcgaattgttgttctgcgaggatgaaaaaaccggtaacgatatcgttgacgaaaccttgtgcgcctaacccaatggctaaactgaagatcccagcgccggcaatcaaggtaccaacaggaacgccgagaacgctgagtagcgcatagagatagaagaaaatcacgaggtatgaaaaagcgttgaccatcaaagtataaatggtgttcatgcggttacttgagaaaccatcagttttgcggtattttctgaagctacgcttaatgatgtatttacctaagcgattgatgaggtagaataaagcggagagtaggataatttgaaacaatccagcaacgagggtgctgagtaatttatcccagtcaattgaagtgatgtagcgcataaaaatattggtctgtttctgaacagattcgaccggagttggtgcggccgctaataaacgtgtgaacatgcgtgaaactccttttttgtagcatgtctttagtttagcaaatgtcagaaaaaatggcacctaatatagtgaagataattgaaggttaagggaaataatgctattctagtctttaagagacaatgtaatagataacgaagtaggaggaacaaatcaatgacgggtggtcaaattgcggcgctaatcgccgcaggggcttttgcggtcctagttgtttttctaatagtgatgctattaaaagtcacaaaagtattaacggatgtttctaagacagtaacggaagccaacaagagtgtcacggttgttactgagaatgttgatattttatctaaagaagtagaaggtttactcagcaaagccaacgtattgctagacgatgtgaacgggaaagtcgctgacttggatcctgttttcagagcggctggcgaacttggcgagagcgtttcaagtttgaatacggcaagtcgcaatttaacggaacatgttaccaacgttgggcggacaaccgctaaggcaacggtcgcttcgaaggttggcgcaagtgcattaagattttaccaaaatcgacgtcaaacaaaggataaggagtaattctcatggcaaaaaaaggacattttctattaggtgtattagtcggtggcgcagcagccattggtgcaacattaatgttaactcctaagacgggtaaggaattacaatcaaaattagtggacttaggtgatgatttaatggatcgcgcacaagactactactatttagcaagtgaaacagcagcagacttaaaagacgacgcaaagctacacatgaatcgcgtccatgattatgcaagtgattggcaagacaatgcgtctgatatcaaagaacaagcaaaagcacaatttgatgaaaaaacagcagacttgaaatcacaatttggcggcagccttgaagctagccaagaagatttcgacgatatcgtgatcgacggcaagagtgcatttggccaagccaaagacgaagcagccgccgctgttgaaactgttcaagaagaagtcactgaagataaataatcaatgaaaaagcccccgccaagcctgatttagcgggggcttttttgcttgtttgaattgacgactagtgcaaattttaaaagtcggtgttataatgaaaacataggagaagagccgtgcgacaacacgactcttctccacagtccgcttaagacggtggcatggtttatagcaaaaataaccgtaaacctccaaagtttagacggttatttttttggattaaatttcagaatctcaatgactaacatggtaaccgaaattgccaacatcagtgcgttgaaaaccgacatgttatcctttctcaaggtaacgcttaatcaacataggcatcaccccatttctgagcgttagccaccgtcataaacttactgttaggattactgtaacatagtttgaatggttaactaccattcaactgatgcaaattttaagggccggtgttataatgaaagcatagaaaaagagccgtgcgacaacacgactcttctccacagtccgcttaagacggtggcaagtttttggtaaaaaataaccgtgactcgtcaaagtttagacggttattttttttgattaaatttcagaatctcaataactaacatggcaaccgaaattgccaacatcagtgcgttgaaaaccgacatgttatcctttctcaaggtaacgcttaatcaacataggcatcacctcatttctgagcgttagccaccgtcataaacttactgttaggattactgtaacatagtttgaatggttaacgactagggattataaagttctttaaaacaaaaggcaggcgaaatcattttgtgatttcgtctgccttttttaattagtgctcagttgctgaccgcaattaagggcactcttattgaaacgtgctgtttcaaactgccttttccggttaaccaaaaaacgcgaatcatgacgaaaagcgtcataatccgcgttttttggttaatcctcaaagccaacccgtttgaatcagcactcttagaatgtttgtagttcttttgtcatgtgtgtgaaggcttctgatcctgtttctgttacgtggacacagtcttcaattcgaacaccggcaacgcctgggatgtagattcctggttcgattgagaaacacatgcctggcttgataatcatgtcgttgccttccatgattgatgggaattcgtgttctgaagttccaatgccgtgacctagacggtggatgaagtattcgccgtagcccgctttagtgatgacgtcacgtgcaatcttatctaattcagccgctgtgataccgggtttgattgctgcttgggcagttaagtttgcttcaagacagactttgtgaatttcgagtgatttcgcatcaggtttgccaaaagcaacggtccgcgtcgcatcactcatgtaacccttatgcaatgtcccaaggtcaaagagcacgagggcatctggggttaaaatgttggcttcggggccaccatgggggttagctgcgttgatacccgattgtacgatggtatcaaaactcatatgcataacgcctttgcgcattaatgcgtattcgatttctgcaacgatatcttgttctgttttacctgcttttaaggcattgaaaccaacttcgaaagcataatcggcttcacggccggctgcttccattaaagcgatttcttcgggtgttttaattaattttaagttttccatgaaacgtgaagcgtcgcctgggaatgttgcgtctgggaattgctttagaatggcttcgtaacgttgaacaggaaggtcgtctttttcaagtgcccaacgtgtagggttcgcattccgtttcttgatttgatctgcgatgattgcgtatggatcttcgtgatcgagatagccgtaaacgtcgagtttccagccagcttttttagcagattcaacttctaattgtggtgtaaataggaatgggtcctgatctgcaaaaacaaagagggctaagacccgttctgcaggatcactttcgaaaccagtgaaatagaggatgttggttggattactgatgtaagccacatccatattattctcaccaagccaattttgtaattgggctaattgattattcatctaaagcacttcctttacaattgatatcactagtatatcacaaccaatgtaaacggtaatgtaaaccacaaatgaaaacaaaaatgtaaatttcatgaaaattagtgtaaaccgcttgcatttgctttaaatctctgttaaattaatcaagaagtaaaatgaaaactgctgaaaatataatctattttattttacaaatgaaaggaatcatttaatcatggaaaaacaaacaattacaatttatgacgttgcgcgcgaagccgacgtttcaatggcaactgtctcacgagttgtcaatggtaacccgaatgtgaaacccgcaacacgtaagaaggttcttgaagttattaaccgtcttgactaccgtccaaatgcggtggcccgtggattagcaagcaagaagacaacaacggttggggtcatcattcccgacgttagtgacatctattttgcatcacttgctcgtgggattgacgatgttgcgacaatgtacaagtacaacattattttggctaactcagatgaaaacaaccaaaaggaagttcaagtgttgaataccttattggcaaaacaagttgacggtttaatctacatgggccacagtatttcagacgaaatccgcgctgaattctcacgttcaaagacaccaatcgtgttagctggttcaattgatccagacgaacaagtgggtagtgttaacatcgattacgttgccgctgttaaagatgcaactttgaagttaatcaaaaatggtcatgacaaagtggcgttcgtttgtggtagcttgaaattcccaattaacagcaagtatcgtttatgcggttacaaggatgccttgaatgaagcaggcattgcttatgacgaaagtttaatttttgaaacagaatacagctacagtgctggtgaagcattgttcagcaaaatcaaagcaactggggcaacagctgctgttgtcagtgatgacgaattggcagttggtgtcttgaacggggcagttgatgccggcgttcaaatcccagctgaattcgaagttgtgacaagtaacaacacgaagttaactgaaatggtacgtcctaagatgacgtcaatctcacaaccattgtatgatatgggtgccgtagcaatgcggcttttaacaaagatgatgaacaaagaagacgtaaacgacaagacaatcctattgccatacagtatcgtagcaagagaatcaacaaaatagagtgctattggttgcggtcagcaattgagcattaataaaaaaatcccgttaatccaggttttaggattaacgggatttttagattaagcggaagttgttgcaaacaagagcacgtttccaccaatcaaaaaaggcctcagttccaaacgattttaaatcgttagaactgaggcctttttttagtttagcgtgtaatattttttaagctaatcctcgtcggatacccgatttacgacacactctcgttcaagaaaatggtaaaccgcgccgattaagttggcgtcttggttgaagtgacaaatttcgatgtgtggcacaggaataggggtgggtgcccctgcacggcgttgccagtaacgattaatactgctattgtcatcggctaaaagtgcgtcaatcgcagcgtttaattttggtagtaggtcagttcgctgactaatgccaccaccgacaccaataatctcgggcgtgtaagcaacgtttaaaaagagcatgatttccgcaagggcagcatacatctgtgcgacttcttgggtggcaatcggatccccttgatcggcaagttcgaagacggttttgccgtcgattgtattggggagtttaaaattacggagggagacagtcttgccaatttggacgggtgagacttttgaattgttgagtgttttaatggcatctgcgatgaatttttcgaagttatcgattttatcagcagtcgttttgagaatggtcccattttcgataatggataagccaatcccagaaccaattattgtgaataaggcgctcagatgaccttgaccaatcccagctgtcatctcggcgagtgctgcactgtcggcatcattttggagagagacgggcagaccaaggcgcgttgcaaattcagtttgaaattcaccgaggtgcaaaaatggcacataactcatgccatggatgatgccagtctgttcatctggatcaccaggacaactcaccgcaatcccggttaagtgaaagtcggtcgcaaattgatcacataattgttcaacttcggaatagaagcgattgcgtgttagcggtgtagggaattgcgcttggttaattagttggtgtttcgcccaaatcccatatttgacggcagaaccgccgatatctaaagctagtaacgcgtcttgtagcatggtggaccatcctttcaaagtaggtcatgcaaatagtgtagcataggcgatttaaaatcggcgcagaaatgactaatttttttgcttgacgctaattgccatttcttgtattatattctttgggcgctttgcagttactttaattgcgaagccagaatcggttaacaggctccctgttcattttgaatagggagcttgtttttgtttttggttgtttcccaaaagcatgaatgtttagcgtaatgctaagaagaaaaggagaatatttatatgaccaaatatgtttttgtaacaggtggcgttgtttcttcacttggtaaaggaattgttgcggcttcacttggtcgtttgttaaagaatcgtggattaaaggtaacgattcaaaaatttgatccatacatcaacgtggatcccggtacaatgagtccttaccaacatggtgaagttttcgtaacagatgatggtactgaaactgatttagatcttggccattacgaacgttttatcgataataatttaaataaatattctaacgtgacgacaggtaaaatttattcagaagttttacgtaaagaacgtaaaggtgaataccttggcgcaactgttcaagtcattccacacatcacaaacatgattaaagaaaaaatcatgcgtgctgctacaacgactgattcagatatcgtgattactgaaatcggtgggactgttggtgatattgaatcactaccattcttagaagcacttcgtcaaatgaaggcggatgttggcgcagaaaactgcatctacattcatacgacattggtcccttacttgaaggctgccggtgaaatgaagaccaaaccaacacaacacagtgttaaagaattacggagcatcgggattcaaccaaacgtcttggtttgtcggactgaaaaaccaattcctgatgacatgcggaacaagattgcccaattctgtgacgttgaaccagaagccgttgttgaatcacgcgatgctgaatcaatctacgatattccattgttattgaagaaccaaggcttagatgattttgtcttgaaccacttcaagatgacagcaccagaagctgacatgacagaatggattgatatgttacacacaatcaagaacctcgaaggcacgaagaagattgccttggttggtaaatatatcgaattgcaagatgcttacatttcagtgaacgaagcattacgccatgccggttatgcttataacaccgatgttaaagtgacaccaatccaatcagaagatattacgaaagaaaatgttgctgaaacattagctggctttgatgggattatcgtccctggtggtttcggtgatcgtggtttagaagggatgatcctttcaattcaatatgcgcgtgaaaatgatgtaccatatcttggtatttgtttagggatgcaaatggcaagtatcgaatttgcccgcaatgttgctggcattacagatgcaacaactggcgaagtacacccagaagcaaaacataaattaatcgacatcatgtcagatcaaaaagatttagaaaacatgggtgggacacaacgtcttggtttatacccatgtaaattaaaaccaggtacaaagactgctgctgcttatgataaccaaagtgttatccaacaacgtcaccgtcaccgttatgaattcaataacgaataccgtgaattgttgacagacaaagggctagtctttgccgggacttcacctgacaatcgtttagttgaagtgatcgaaattccagaaaacaaattcttcgtggcagctcaatatcacccagaattcctatcacgcccaaacaaaccagaaggcttgttcaaggcatttattggcgcaacaatgtagagtgctgactcgaacgggttggctttgaggattaacaagaaaataaggattatggcgttctttagccataatccttatttttaggttaaccggaaaaggcagttcgaggaagcacgtttcataaaagacgctactagtcatcacgacaaagtagcgtctttttgtataccgaaaaatagttgtgaaaatggagatgatccgttttgaaaagccttacatttttagacttcgatagcccaattgaatgcgatgattagcttttactaagtatgaaaattaaaaagtaaatgttatccctaaatgccttgtaatttatgtgctgattaattattattatacatgtatgactaattatcaacggcattgagtagattgaagccgttttccaattttaaaaaataaaactaaaaacttaaaaatatcaaaagcgccttctggtttaaaccacaggagaagtgggaaactgaaggcggttcttttgttgcagagcgaacggggaaatctaaaaatgaaaaaaatgttaattcaaggtggcaatctcttatctggagaggtcacaattggcggtgcaaagaatagcacggttgcgattattcccgctgctattttggcggagtcgaaagtcgttttagactgtgtgccgcacattaaagacgtcaacagcctactatccattctagaagatatgtctgtctcatctacttttgctgatgacacggttgaaattgatccaacccacattatttcgacaccacttccaagcgggaagattcaaagtttacgcgcctcatattatttcatgggggctttattaggtcgttttggggaagcaatcgttgggttgccaggtggcgacgatattggtccacgaccaattgatcaacatattaaagggtttgaagcacttggtgcgacagtgactaataaccacggtgctatccaaattaaggcaccaaacggcttacacggtgctaaaatttatcttgatatggcatcagttggcgcaacgattaatttattattagccgctgtccgtgctgaaggacaaactgtcattgaaaatgcagcacgcgaacccgaaattgtggatatcgcgacattcttgaacaacatgggtgctaagatccgcggtgctgggactgacattatccgcattgatggggttgaacatctgtatgggcgcaatacacacaccattattcctgatcggattgaagcgggaacttatttaagtatggctgcagccatcggggatggcgtgaacgtcaagaacatcatcagtgaacacatggacgcttacctcgctaagttagaggaaatgggcgttaagatggatgttaaggaagatagtatcttcgtttatccatcacctaatttaaaaatggttcaaattaaaactatgccatatcctggctttgcaacggatttgcaacaaccactaacgccgctcttattaaaagcgcaaggtgaaggcattgtggttgataccctttatcctaaacgaacacgccacgtcccagaattaattcggatgggtgcagatatctcaatcgaaaatgatgtgattattttacatcatgccgacaagttacaaggtgccgaagtatccgccgatgaaattcggggcggtgcttgtttaatgatcgctggcttaatggccaatggtgtgacaacgattgataacgcaagtaatattttgcggggctatgaccgcgttgttgataaactaacgggtctgggcgcaatcgtcaaaatggttgaagaataagttaaccatctattgttttttgttagcattcatgctaatatttaatggttatgtaaacaaatatctctgacatagcaaatatctcagggcaagacttaagttgtgcatctgaattgatgcagataactttagcaaaaaggagcggaaaagacatgaaacaaggtattcatccagattatcacaaggtagtatttatggattcatcaactggcttcaagttcatctcaggttcaactgctaactcagctgaaactgttgaatgggaagacggtaacacatatccattaatccgtgttgaaatttcatcagattcacatccattctacacaggtaaacaaaagtttactcaagcagatggtcgtgtcgatcgtttcaacaaaaaatatggttttgcagacaagaacgctgccaaataattattttgaaaccggggaatttttccctggtttttttttgcctttttttccataaaaatagccaattgcaaacggcaatcagctatttaatcaacattttttgaattcgatgactagcgagacacgctagcaaaatgactgggaaaaattgaatcgggaaaagaaagagtaacaaagtagcagtgacgtacggttgcgccacgatcaccgtacaactgacagcgacaaccgtggcaaccaggaggccgggagtgtatggcaacacaacggcgagacttaaaacgattgccgcacttgcaaagatggctgggaaaattttaccgccccgccaaccaaaggcaaatagcagattagttagaacggtttttccaagtccgattaagagtaaataaatgaatgattgatctaaaccggatttggtaaaggtgaacaagtagtgttctccagaaaagagtaaataaggcgacaatagaccacaagcacccaagaacacaccagcgatcattgcaagtaagaccggccgctgaatcgtatcaaagagccactggcaccattgttctatttttaagaatagattgccaaaaactcaaccgacaattaatgctaaaataagaagtggccaaactattaatgtccaatgaatgattggtgtgtgcagtgtaaatggactttctttggggaagagttggttgaccaaggcgaaaccaagaatcccagtggcggttgtgagaatgtataatagaacttgattgaagtgtgatttgaaatgatcgcgcaaggaggtcgtctcaatcgcctcaccaacaccggctagcggtgcgtggaagatggccgctagtatggcaccaatccccatcgtcaaaaacgtttctttttgctgagcggttagtttaagtcgatcgcccaaccaagtgattaggccgccgacgatggtcgagagcgcggcttcagggccaaggctagcgccgcaggctaatacaactaaggtggcgataatgtttttaccgacttgctgttggtaggcaacggacccggtttgtttaaattcgctgagtgtttcatgcattgttttaggataaggcccccaataacgttgcattaagccgacgagtaatccgccaaatagaccaacaagcaacggataaaatggctggttgaaatgcgaataaccgacttgccaaattaagtgtgtactgaaattaatgagggctaaaaaggcggccgctatgccaccaatcaacaatcctaaaagtaagctatataaaacaaaaataattttaaactgcgtggttttagtggtaggtgatgacatagagcctcctagttaagggaattatttatgaactattatgcactacccacgctagtttgaccatagtcgaattgtgaggatatacatatttttgtcaaaagttaggcgaaattttcagggagcagtagattaagtagtacaatgtagatatcgagttaaatggagggaattcaatgtataaagcggttgttttttttgatctagatggcacactatttgataatcaaaagaatgtttctgatgacaacattgcagcaattaatcagttacgagagaacaatattctccctgtaatttcaactggtcgaaatatttttgaaattcaatatgtgattgacgctaccggtatcaattcattagtcagtgcgaacggtagttacgttcaatatcaagggaaaaagctaaaggctgagcaaattagtgatgaggtgattgaagagattttagcatttgccaaaaagcagggcgatgtgatttcattctataacaatgaagaatttgccttaacagctgaaaatgacttaactaaagttaactatcggctgttaagattgacgccgcacgttgagccggacttttacaagactcatgaagtcaatttcttgaacgtttttaattatgataaagataaactgtatcaggatgaattcaagggtgaattgtcattggttagaaataatcctcgctgtttagatacgatgaagtgggggatatcgaagcaaaccggcattcaagcactcttgaagaaagcgcaattaggggacattccgtcctatgctttcggagatcagctgaatgatttgcaaatgtttgctgaagtggattacccagtcgcaatgggtaatggtcacccagatgtgaaagccaaagcatcattcgtcactacttcaaatgtgaatggcggaattgtgaatgggctgaagcattacgggttaatcaaataacttacgatacgcaatcatttaagggcttcaccctgaaatcctcgttttggatttcagggtgaagcccttaaatgatgggattaaagcatcaattgtcccagttttccaaatggattgaattagtccatctgttttttaatgttagccaaggtcatttcactggtatcagtaaagttcacatctgcatccttcaaaattgtcttgtcaccaattccaatggaggtttccccagcggcgttaattgattcaactccagcggcagcatcttcgactccaatgcattgttctggtttcaaattgatcagttcggcacctttgaggtaaatttctggatctggtttgcctttgctcaaagtttttggatccacaatctttggaaaataatcagtcaattgtagcttcttcaaaacagtaggagcattttttgatgcagaagctaatgataacagataaccaccatctttaatttcatccaggaattctttaatccccggaagaatattagctggagtcattttgtcaaccaacttcaagtagtttgtatttttttccgttgcaagatcaaccttctgatcgtcagtatagtggtcttgtagattacctgcttttaaaatcatttcaagagaatccatccggctgattccctttaatccgtcttcaagttctttggaccatggggcacccaccttgtcagcaacttgatgccaagcttggctgtggaaaaccgaagtatccgtaattacaccgtcgagatcgaagacaaaacctttaatatctgaaaactttgccattgtatttcactcctaatcttatttgtaagtaataacagttggcttgttcttggataatgaataacccttgtcaccaaccttgatgtgactgctcgaatcggcagtcacattgattttatgatgaccgatttcaaaattgtacgtgatgccttgatacgtttgcttaaatgatagcttactccaagtggttggaaggtgcgggttgatggaaacctcgtcggtgtcaaaccgaaccccgccgtaacacttggtttcaatttcaagcgtagcacccatgacgccaaggtgaataccttcagcagtggtcccaccttggatatcatagtaatcggagaacaaggcggttgagaacaattgccaggatcgatccatattgccatccatttcatccagaactgaataaacaattcgtgaaagggtggatccgtgagtcgttcgatcaaggtaaaatcttaaattggtggtaaagtagttggcgggcaacttgtaaccaagccgggtaatgacgttttgaacttcatcaaatggtaattcgtaataagccatcaaagtgtcggcttgtttggcaacttgataggaatcaggtgaattaccttcaccctttaacagtcgatcaattcgcgatatatcaccgtatttcttccggtaagaatcaaagttgagcttggaaagattgaagtaaccggaaaattgaccaatgatgccttcttcgttgatatcgagacgaagtttgtgggcaatatcactcatttgatcaagtaaactattgtctgtttgggctttttcattggcagatttgattatcttaggatcttcatgactcatcagctctgcgactttatcaaataaccaagaaaccatgatattggtataagcattattagtgagtccgtgatcatcagagtttggatattcttcgtggaattcatctggtcccatgacgtgatgaatatcgtaacgatcatcttttttatcgtagcttgccatgctgacccagaacttgcaaattgacaataacatttctaatccgtagttcctcatgaattcggtatcacctgttagatgaacataattaatgacatcgtaggcaactgacagtgaaacgtgacgttgcaagcgactgttatccggatcccattcaccactaaccgggttcaagtgaacaaattgagattgttcatccccatacatccctgactgccaaggatacattgccccttgcttgtcttccgaggcggcgtatttgcgcgcttcaccgattcgattatagcgatataacaagcactgtttagcgattgctgggtaatgaatagcataaaacggtagatcaaaggtgacatcccagaagatgtggcctcgataagcttcaccgtgtaagccacgagcgccgactgaggaatctaattgaccagaagccaaggcggcacttgtcacaagcatatggtagatgttaacccgcgtcagtttttggctggtcatatcattatcaatttggatatctgaattctgccaaacgttgctccagaacttttgactgtcggcgagggtgtcattgaacgaagaagcgttcagttccttttgggcgggttgttccaagttggcatcctgagtttggctggtaaatactgtgacacatttttcaaatacatacgatttctcaggttctacttggatatccaatttttgctggattgatttatcttcagtttcagctgaaattaacttggtggtatcgatatctttgctagaaagcttagaattaatcacaaagttaacgtgggacgtcttggtttgaccggttaacgaaatctggttatcgcgggcaaccatgccaatgacgtcgatatggtgttgatcgaaaccctgatagcgctcaacattgccattaataacagtcccgtcaatttttgaatagagttgaatgctcccagaaaagttgattggttttaattcatacttgatggaataacgatgccaatttgtcatattggcaactttggtagcccgaacttgcaaaatgtggccagttgataattgaatatgcaaggtggttgttaaaacaccggttcgcaaatttaggcttcgataaatatcttgaatatcttcttttttaatttcaaacggttgttgatgatccaccccaaaactgatgtattgagcattggggaggtttactagatcttcgttgacaacatcccgaccgttaattttggttgtgagttgattgtagacaccagcaacgtacatcccagggtaattatcctggttggcgttcgcttcgacatacgcaccccgcaggccaaagtagccgttaccgattgtcagcatggcctcttgcccatagttacgcttgccgctgtactcaccataataatcaaggtgccacttcaaatattcctgtttttctgccactgctttttccaaaccaacatcttgaaccttatgcaggttaacgaccggaatattcatcatgttggcaattgctaggccaatatcgatcttttgatgattaataccgatgatcgtgtcagagaattcatagttcaatgaatcctcaataattgctgcatcaattggcaccccagtgagggcagccttaatgttctcaagattatcgccaattgaaaatttggggttgtaggtgatcataaacttcctaaaagggggcttattggaattctctgaataattgatttccatgaccccatcacgagcccttatcgcaaacgttctcataacaaaacctcttctcaagtatttccatttgtgaaaatcatttataagttaattctagttcaaatatccggtaatcgcaattaattggggtttgaaagtaatttgagcaagccggctgttttcatttttgctgattttcgagtagatctttgatttctgaaagcaggacttccttgcgatcaacactggcggttttgggctgttttttaactatccgattaatgatttatttgagctgtggaaggtaaacgtacccacagtctaattggtgaatggcactatgaagacgttcaggacaaactgtggccagtgacacaacttgatgatctttggtcaattggccataagacagccgagaaattaaataagttaggtatcaattcaatgtatgacttggcccactataacccgtttcttttaaaacagaaatttggggttattggcgggcaattatatgcgtttagttggggtatcgatcgggcgttaattcgtgataagtacgtacctaaggctaaatcgtatggaaacagtcaggtgctaccacgcgattataccaagcaagaagaaatagagattgtcttacgtgaaatcgccgaacaggtggctacaagaattcggtcacatcataaagcggctacagttattagcttaggaatcggttattctttcagagcaaaggaggaaaccaggaaacgtggttttggccactctatgaaaattaatgccaccaatgataacggacttctagcagcttatgctataacgctttttcgtgataagtggcaaggcgaagccgttcggaacatctcaattagctgtgctggtctagttgacgataatgttgtgcaattgaatttgtttgatacaaagtacaaaactttaaaaaatcgcaatcttgatcgtacggttgatgacattcgaaaaaaatatggtttcacatcactgattaagttatcaagtaaatctgttggcgcaaccgctgtacaacgtgctggcttagttggtggccacgctggagggaattcctatgaataaacaagaatttgacccaaacctggtaacacagtttttaaaccaatatcaagaccgaggcatgatgaagtggcaaggattttacttgagtgatcatacggctagtttgaataaggtagatcgtgaagacgaaattaaattaaatcgccggcatagtgaacaaatggcgcttaacgagattgaaagctgtttaagtcaggctttggaaaagagtcaggttgttagagtcgaacgcagcctgcaagatcaaaatggttatgtggccccttttattgaggggaaaatagaaggctattaccaggataaattgatgattggtggcgagtttatagccattaatgagatctatgcaattagcttgatgaaataacaaactagcattaatctaataaatgccaagaatatgctaggttttgtaaccgagtatctatttcaatatattggttatacttttttactatttcagtaaattctttggcatcagttatatgaatgttattatcattcgttagacctcgaccgtatgcaacaatttcatattgaaccaaagtatcttgaacgttctcaaaagtaaattttttaccatcaaaggcaactctaactaaatcagaaagcatttttttcgtgccatctttcaaatttaatggtacctctattggtgtatcgcctttaggaacagtaaaaatcggagagaatcgtaaccaaatctgcagacaatcaagccattctcctcgttcttcatagtaaaaaggttcagtaagtgctagtttatcgtactctaattggtatttcataagtgctacttcctttcgttatttgtatgcctcatcaaaactcctttttaagtccgtatgctaaattgtttgtaagctcaacaactaaatcaattattctttaacgtctgtaattgagaaaaaggcaaatcaaaaattcctattttaaaaagaatggcacaatcaaataacttgtatgcaaatattcaattgcctataattagatttagaaggatgcaatttagataatggaggatttcatatgaaaagatttggactttggtcaaaaatatcaattatcatttctatatctcaacttttattagccatttttaaagaaattcaaaactataacaaatctaaaaaacatccttcgaaaaataagagaggatgaggttttatgcattggttatgggttttaattattggtgccatcattggtgctattgctggagcaattactagcaaaggaaaatcaatggggtggattgctaatattgttgccggattagttggttcctctattggagaagctatactcggatcttggggccctcaattagccggaatggcaattattccttcaattattggagcagtaattgttgttgctgtagtttctttctttgtcggtaaatcaaagaattagtttttaagcttcatttaaggttcttatactaaattatagatgctaacttagttagcacccctcgactttgttgtgagcggagccaattaataatattcctgacccacttagttttaaactaagtgggctttttttgttccttaaataccctatcaagttcaccagacagcagattcccatcttcatcacaggctaccagctggcaacgacaccttggatgagtatccgtgactggaatcggtgcttgtccataggcaaatgtttgtctatcaagtggttcacaaatatcacaaacacgatcatcttcctcggttaaccacatcacatactgaacattctgttcatcatacgctctattcttaccaccgttgctattgcgtatagcttcattagttgttaacgtatgaattctggatagcatttggttcataggcgttgttaaattgtcatcaattcgatcaccgctttgaggaatactgcgggtcattttattgatgtctgatttcttcatgcggcgactcaaacccttgttcagggtttctttcattcgtgtcgtcatgacgtcgccatgcacccaaattcgttgagaatactcagcttggttggctactttatctggaactgttgatagtttattagggcttgaattattatagccatcgatatactgctgtttgagttcattcactgcaaatgattcactttttgctgtagcaatattcataccggcgccaatcattgcacccaacatatcacgccgagaaatagatgcttgggcaaagattgcttgcaagcgtttagacaatttatcactaggactagcgttagctagcatttcatcaatctaccttttaataccgtatttcacacggtatcgaataaaggtcgtccgtttaatacctgtatttcgggacacatcaatgtcactcatgccagctcgataaagcttaaaagcatgttgcaagcggggatcgtcttgggtgtattggggtttgcgcccatgatatttaccctgctgcttagctaaggcaatcccttgctgctggcgctcaataatccgcttccgttcactttcggcctgatacttatagagttcaataatcaagttggtcatcagttgacgtaaatttgggtcagcaatccctgtcatggacggcaaatttaacacatctagggtggcacccttattttgaatggagttcatgatcttagtcaaatcatggttgtttctgcctaagcgatctaattcagtgaccattacaatatcaccctcacgaatataggccagcattttttgcagttctggccgattagtgttagccccacttaatttatccgtaaataatttatcaacgtcttttaaagccgctaactgtcgatctaaatgttgctccttggaactcacacgcgcataaccgattttagccatttccaattctccttttggacagttctaatgaacacttgtaattcctagtatagcacagaaataaaaaaggccaatagggtataccctattggccgcttttgatccattatcaatggctttttaaattagggcctagtacttttggaatggaaatactttccaacaccaaaaattctagacccgattatttttgttaaacgagatttctatatataatggaattataaatttactgttggaggtttttatgactgatttatttgcagatgggactatctctatccatggagctcaagaaaataacttaaaggatgtcagtttagatattcctaagcataaaacgactgtatttgctggtctttctgggtctggtaaatcctctttagtttttgatacattagccgctgtttcccgacgtgaattgaatgaaacttttcctagtttcacccaacaatatttgcctaaatacggtcaacctgaagtgaaccgaatcgacaacttaccagtggcaattgtggttgaacagaagtctattggtcgtaattctcgatctactctggcaacctacaccggcatctattccgtcttacgtttgatgttttctcgaattggacagccttgggttgggtattctgaatggttttcctttaacctacctcagggaatgtgtccaaaatgtcagggattaggctttgttgacgacatagatgaacgtcaattaattgatcctaataaatcactcaatgaaggtgcaatgacttttgccggttttcaaccgggaacttggcgttggaaggaatatggcaacagtggattatttgatttagacaaaaaaattaaagactacaccgatgaagaatatgatttattcatgcacgctccgcaacaaaaattaaaaaatccaccggcaaattggggccgtacggcattatatgaaggactagttccacgtatgcttcgctctgttattcatagtgcctcaggtcgtcatcatgaagctgccttatcaaagattgtcactcgaaaaccttgcccagtatgtcatggaacacgtctgaacaaaaaggctctaactggtaaaattgctggcaaaaatattgcagaagtcagcgatatggatttagtaagtgtcctaaaatttttggataatatctcggaccccaaggctaaaacaatggtgcgtgaactacatagtaaagttcaagctttggtcgacatcggtttaggttatctttcccttggccgtggaactgatactctatctggtggagaagctcaacgaattaaaattgccaaatatttgacgagttccctatccgatttagtttacgtactcgatgaaccaagtgtaggactccatcctcacgatattaaattaattacccaatccttaaaaaagctcaaggaacatggcaataccattatcctagttgatcacaaccctgccattatttcgacagcagattatgtcgtggaaatgggaccacaagccggcaaaaatggtggtcaagtaactttcactggtacctacgacgaactattacggtcagatacgattacgggtaaaatgttacgagaaaaaatcactttccaaaagcctcgtgaacctcaatcttggctaaatgttaatcatgtaacttctcataatttaaaagacgtatctaccagaatccctcaaggtgtaatgaccgtgatatctggaccagcaggttctggaaaaagtactttagtccaagctttcaaacaacaagtttctgatcaagactatattgatttgagtcaggattctgtaggtttgaatattcgttctacacctgcaacttacttgaacattttaaatcctctacgaaagcttttcagtaaagccaacaatggcgtttcaacacaactatttagttataacggtaaaggtgcttgtccccgttgcaaaggtaaaggtgtgatgatcaccgagatggcattcatggatccaatcgttcaagcatgtgagttgtgtcatgggaaacgttatagccaagaagcactacaatacacttatcatggcaaagatatttctgaggttctaaatctttctatcaacgacactttagagtttttcaaagatgtgccagatatctacaaaaaggttagtctactccaccaagttggacttggttatttgaatcttagccagtcgatgaccactttatctggtggtgaagtgcaacgtgttaagttagcaatggaattgaatcataccggccgaatctatttcttagatgaaccaacaaccggattgcacttacaggatactcaacaattgatcgatttatttgaaggattggttgataagggcaatacattaattctgattgaacataatctgaaattaatttcacgagccgattggttagtcgatatgggacccgatgctggtaaattcggcggtcaagtttgttttgaaggtcatccaaaagatagcctaaacgataaaaactctcggactggtgctgcattagcagctataatttcttaaaagattcaaaaagatcacctcatttaaagtgcaacacagtggttcagttcccggcttagccgttcattttgaacgtaaaactgaccatcacaccaacaaagaaattgatgtgtcgaaaacttatctgaatcaagatctgatgacagatggttctgatatgctttcacgcttcaatgagcgtttaaatgacgtttattgcatgaaaagagacgatgtgaaggcgttagcgacttggattgtcactttacctgaagaactctcagaagcgccccacgatcaacagagcgccttttttgaagcaaccagcaattttctcaatgaccgttatggtcaagaaaatgccgtggccgctgtcgtgcattatgacgagacaacccctcacttgcactatgcctttgtccccgttgtttttgatgataaaaaatcacgctataaagtatccgctaaagaagtgctcacgcgccatgatttgcaaagctttcatgaggatctagatcaggatttaaaaaaggtgctgcccttttatgaacaaggcattttaaaccacaaaaccttaccgtttgagaatgtcgctgaaatcaaaaaatacaatgatcagtttaacgacctaaaaaccgaactagctgacgttgaagaaaatattagggctaaaaaggccttactcaaactcacggatcaagccttaacggaagtggacttagccgaaaaaaaaattgatgattttaaacaagacttatctaaaaacttttttggtaagacggtgcttaaaccagatgacttagatcgctttaaaaatgtgttagccacgatgaagaaagccaccttacaaagccagaatgaggcagaagacctcaagcaaacgttaggacaagtcaaagcgcaattagctgaaattcaatctgactatcaaaacctgaaagaaacgcatcaagcgcttcagcagcggcagcgagaacagcaacagatggattatgccatgcgagacatgcttaaaaatgattatggtgtcgaccaactatcccatacggatgtggaggcccggtatgttctttataagctggatcatgaagaactcactcaaaataaaaaagaggcccagtcatggttaaaaaccttgacgacagctagagaagatccagacaccaaaatagcacctagtagattagattggggtattgaacaagttaaagcattaatcaatcggatcattgaattaacgcgtgatatttttaaggggccaagtctttaacgttataacggcttatttgcccgtataagcgtttttagccatgtgacgtagaaataatcattaaatagattaaaacgtcgctattggattaataagtggcaatcaggttacataaccagtaatccatcatttaaaataattccaaacaaaaagaacactctggacaaacattatgtacaacggtgttctttttgttttgtttttattaattcaataaaaaggcgtagcctattataagtatatcttttatattttaatcttttgttctttttaaaagtccgattgaatatcgaatttttacaacccagaaagctacttaaagtttcgtccaatatttggggttcacttcatgatcgtcttttttaattgattaaactgaataattaattaatcactaccactatttttgaccttcaggtttcaaatcaaagcgatgtgaaacaattccgtataaaatccaacctgcaaatgttactaatgaaccatatgcaagctcactgaagccaaccgcatacaatgcgtacaagctataaatagcagcaaccattgcaattgcatttgttatcttcatcgatttaggtgatactttggcatctaattgcattgtctttaatgctcccatcgagagaagatatgggataacattcgtaacaaccgctaagtttaccaataccgtaaattgttttgaaagtgatggactaatcgtcattaatgataataaagattgtaaagttgtaataatgaccatcccaacgattggtgtgccattaccaactacttttccaaatactttagggaaatagccttcaacagctgaactgcggaacacttcagcaatcgtaaattgccaacctagtaatgaaccaaaacaagaaataaccattaaggcaagtacaatactcccaattgttgggttaaacatttgactaaatgcaaccccaaatggcgcatttgatgatgccaaaacactgtttggtacaatcccttgcatgatgtttgttgaaataatatacataattgcagcaccaattgtcccacctaaaacggcaattggcacatttttcttaggattttcaacagaatccatattagctgatgcggattccaatcctaagaacgcccataatgtaattgaaattgatttactaatcccattaaagaaacttatatgatgtggattccaagcattagcgtacattgtgccactaaagaagaaccaaccaccaattgaaatcacaacaactggaataataacaccccagactgtaaatgaactaatcttaccagtaattttagcaccaccaaagttaagtacagttgctaaccagagcgtaataattgttccaatcgctacctcaactgggctcaaatgccaatggaacaacactgcagcgtaaccaacagctgaaattgcaatggcagcattcgcaattactaacgaaacaccatatgtgtagtttgccatgaatgaaccggctttaccatatgagtattcagcataaccgcccataccacctgatttcttagtgtacataccagcccgtgaaaaggcgtatgccaagcacatcgcccctgttgctgttaccacccaagataaaatagacattgtcccgacttgcgctaaattagttggcaacataattatcccagaacccatcatattgatggcagtgataattgttaactgcataacactcatttttttcccatcttttgccatttaactcacctcatcataaaaataaacgtagtgtacatcagaatgtgtactacgtttaaagtttgtttgatcattatttatctaatacataaccaaatgcagtagtataaccatcaatatcttcaaaatagacaccttgtatttctggtgcaaatccagggaacttgttaatcccttcttcaagaatcaagaagtatttttgagctacttctgaccatctttcaccaggaacaacacagaaaatacctggtgggtaaggaagtgccccttcaagtgcaatttctccctgaatgtcctttaatgcgactaacttagcgttattccgcaataattcaacgtttgcatcatatggtttcattgcttgttctgggaagtgttctgctaagaacatcttcttctgatagtcttttgcattattttctttatagaaatcatgcaattcttgacacaattgacggattgtataaccattatatctttctttatgtgcttcatataacgaaggtaatacatcttttaatggtgcatctgctttaactagggcttcaaacttaataatttgtgaaactaaattatccatcttagctgatgtttcggcaggtgtcatcaagaatagaattgagtttaaatcattcttttcaggaataataccatgttcacgtaaataattggcaagaatggttgcaggaataccaaaatcttcgtattcaccggtttcaacatcaatccctggtgttgttaacataaatttgtttggatcaatgaaatattgattattttcatagccatcaaatgcatgccattttgcacctttttcaaaacgccagtagtcgatattattgacgatttcttcagtatcagcatcttcccatttcttaccgttcaccattggtggtaagaaaggtttaatcatcgatgcattctttaacaaactcttccgcgcgttaacggaaacaaccaaagcatcatgccataatcgcttaccagcttcgccatcttgcatcttcgcattaacatccaatgttgcaaacaatggatagaatggtgaagttgacgcatattgcatgtaagcattattgaagcgcttgtggttgatatatctcttttgacccttgatatgtgaatcttttttatgaatttgtgatgcttgtgaaaatcccgcttgttgtttatgtgttgattgtgttactaagatacctggatcttcaggtcctaagtctagtaataatggtgatgaatcacgcatcattggaataaattgttcataaccaacccaagctgagtcaaagaggatatagtcacaaagatgaccaatcttttcaacaacttgttttgcattataaattgttccatcataagttcctaattgaataacagctaaacggaatggtcgttttgctttagctttttcaggatcaactttagcgatttgttggcgaatgtagtcttcatcgaaatctttagcgtaaatacccccaataaagccataaggatcacgtgatgtttcaagataaactggacgcccaccatctttaactaaggctgcattatagactgatttgtgattatttcgatcaaataatactaaatcaccgggcgcaattgcagaagtgatcgcaatattatttgaagttgttgtcccgttcattacaaaatatgtcttgtctgcattaaatactttggcagcatgtttttgtgcatccattgcgggcccttcatggattaataagtcacccaaatcaacatccgcattacaaatgtccgctctaaaaatattttcgccaaagaagtcgtataactgtcttccggctggatgtttacggaaatattgaccaccttgatgtccggggcaatcaaattgaatgttgccacgatcaacatatgctgttaattctttaaagaaaggtggtaaaacaccttcttcatatttagtagcagcagcttcaatttctctattagcaagtctgtaatcgtattcatttttcgtatcaatgatatggaaaatttttgccattacatcctttccgattgttgaactgttatcagtaacaataaaaattgggatatcaaattttgtatcatcaacagttgttacatattgcaaatcagtatctgataaaacaacagctgcgacatccacaaaatcggtattctcaactagtacggtttgccgatccgttgaaaaaaattggtttaaatcagcggaaacagcaattttcatctttgtcatgtgtgtaccctcccaaatctctaccttgttaaataattaacaattatattctagcactaatgtaaaagtactgcaagggcgatttgtgagcgctttctattttcacaatgtatccatattaaaatgaatgcttactgtcaataacttacactaccattatttttagctaatagccgccattccggacattaactctctaagaaaaaggagaaaaaataaaaagtttaataaatatattattttttatgcatttattaaacttttatatttttttattttcattttaaaccagctattttcattagttgctttctaaaataattcatgctattttaattcattaagtcagccaatctcgaaaataccattcttcaattctgtttccactcggaaataagacataatagcaagacccaatgaaattagttcaattattggtaaacttgcccagacaccgctcattccgaagcaaagcgcactgattgttaatacaactgctactaatagatagccacgtacaaaaactaatgcaagtgaaacgcgcgtcttattaattgatgcaaagaatatattcaaaaccacgtttatccccgagaaaaagatacttaagaaatagattggcatcccgtcactggcaattttaatcacttgcgcattattttccgtattaaatacgccaataatctgcgcgccaaattggaagacaataaagtatgcaactatcccaatcactaatgcgcaagctacgccatatttcaatacaaacttaatttttggtaatgcatgctctgaataggagcgacttacaagtggttggattccctgagcaacacccgtaaaaatggcaagcaccactaataaaatattagtagcaatcccgtatgctgcaacacccatattgccactaatatgcaagataactaagttaaatacaaaaataccaatcccattgctcatctctgttaaaaacgagggtaagccaatttgaattgcactactaataattttaaaatcaaatccataccagccgattgttaaatgattatcttgtctaaaaaagtgactaagaataatcaaaatactaatcattggagataaacttgttgctagtcccgcaccgaccattcctaattttaaaacaagtattaatagccaatcgagtaaaatattagtcaagctagagataatcatcgctaccatggctatcatggtcccccgatcattccgaacgaacgataatattaaattattaaatacaaaaaaaggaccacaaattagtatgattctgacataacttaatgtatgttgccaagtctctgcatctgctcctaatatcccagttattttcgacgcaaaaagtagtccgcacatcgagaaaaaagcgcccaataatagcccaatataaaacatttgtgtaaagacacgattggcaatctttggattgctaattttatagatggtaaaaattgtcgcgccacccattccaagtagtaatcctaaaccttccatcaagttaaaaagcggcatcgttaagttcataacggtgacccccagaacaccaattcctttagcaacgaagaaagaatccgctaaaacataaatcgacatccccactgcacttataatcgctctatagacatattgattgagttcagccaataagccttttcgcctacccatactatcctacgacctctccaaaatagttgatcactactcccattataccacggtattggattagcctattttacggatcatatgttcatattgatgattaccaatcatcaattccccaacgacttgataacccattttttcgtataattttttggcacctggattattaaaatctacatttaaactaataatctgtttgtgattagccttggcaactgattcacatgctgccaatagcttagatccgacacccttaccacgtgcttgtggaacaacggcaattgtatcaatatgccattcacctggctgtgcttccttatcggtaaagaaacgcgttgtctcaggtaagccgatttgtgggaataacggtgctaatgcatcgtcgatatgggcttccttttcttctgggaagcctacaacaatccccaatacttggccgtcttcttcataaactagtgtgttagcataactataccgatattcaggcattgcaaaggcctgttctaaaataccaaataaatcctccaacggaatcttttggaagagtggcatttccatttcttcaaaaacaatattaataatttaatctcttttttattaaaaaaacgaatgcgatacggtgatgaaaattattgtatcagggcttgcttttgggtgcgcgcatcagctgaaaattgactataattggcttatttattgttcatttggatggatattgggcagtacctatttttggacgaaggatattagatgttcaatagtgctccatatgctcgttaatctatttttaatagcacattgtagataaaatgatttaaatgaacgattataatgacagctaaaaagttaacgactgatttggtcatgttgaacacctcatcattttatttcatggctactctagtgctatcttgctggttaaacaactagaatgagaacttaataaccaccaaatgaaagcgttctaatttaaggccgttttgttttgacaatgcttgataagtggcttacatttaattgtgaaggatagcacaacctatccgcagacatttgtgtcaattcaaatggaagaggtggccagaatggcaacgaatcaattagtattaaaaaccgcagacatttgcgatatccgggatattgaggaagcacgggcaaccattaaaccgtatattcgcgaaacacctttaattcaatcgatgttcttgagtcgtaatgtggcgcacggtcatgtctatttgaaattggaaaatatgcagctgacgggatcgtttaaattccgtggtgcgaacaataaaattaaccatttaacgccagagcaacgggctaaaggcatcattacagcttcagccggcaatcatgcgcaaggggttgcattgaccgcgaagttattagggattgatgcgaccgttgtgatgccagaagaagcaccgcttgctaagcaacaagcgaccgccggttatggggcgaacgttgttttacatggtacgacttttaatgattcgcggttgtacatggagcagttagcagccgaaaagggcttaacaattgtccacccctacgacgatcgcgaagtcatggccggccaagggacaatcggccttgagattttggatgcgatttggaatgttgatacggtgattgtaccggttggcggcggtggcttaatctccggcattgcgacggctttgaaatcctttaacccctcaattcacatcattggggttcaatcggaaaacgtgcacgggatgacggcttcatttgaagcaggcacaatcaccagccatcatgcggacttcacgctagccgatgggacagacgttgcgattccaggtgaactgactttcccagtggttcaaaatctagtcgatgaaatgattttagtttccgaaaaagaaatcgcaactgcgatgaagaatctcatgcaacggactaagattgtcacagaaggcgctggtgcattaccaacggcagcactgctgagtggtaaaattgatcctcaatggttaacagataaaaatattgtggctttagtttcaggcgggaatgttgatttaacccgcgtttcgggtattattgaccaactcttccacccaactgataaaagcaaaggggttgttggataattaaaaagccggcatccgtctaaaaacggatgtcggcttatttttgtgctgcaagaaaggctggaccatgatcgtcgattagggcgtgaaattcttggcagtctttaacagtcatttggggtaagagctgtggttcaataacctgttgtacctttaaatagtggaggtcttttaaagaacagtgctctaggtgagcaattaagcggcgggcatataaatcagcgataaagactgggcggtcgaagacatataataaaatgacatcggctgtttccggaccaatgcctttgatggcaagtaactggcgccgtaggtcagtggtggttgtcatctgattgagcgtgtctaagtcaaaatcaactgtcactaaaaatcgaaacagccctttaattgtcctgcttttagcgttattgaagccgctgggtttaatagccaacataagggcttcatccgaaagagaaagcagattgtttggctcgaagtgcgtacttgatcgtagattggcgagcgagcggtcaacattttgccagtttgtattttgaactagaaccgcgccaaccattgtttcccaatgggaatcagaaggccaccagtgttgcggcccatattgccgatacattgtttgaaagagttggtagtaatcaattttaccgttcatgaaaaatgtctccttaacataaaaagacgctacttcacctttggcagtcacttattgtcaattcgcttggtgcgcagttgtagcagtttggaagttgtggctaatgagatggtggtcaaaatgatgaaaaaagtggttgaaagtaagaaacgcggcatctgcgccccagaaaattttaaaataatcgtggtaagggtactaaaagtggtgaggatgtttaaaatcatgagtgaaatttcgtagttgcccgattgtttcgaaatgacgtggccagcgtataataagccaacgccgaacaatatatatgagaaatagaaaataccgaagaaaacgatgaaaatagttaatgattctttggcgtagacgagaatatcggtactggtaaagatgcgaatcaaagtatttagaatctgataggtgagataaagtgttgctagatagataaaagtggggaagtttcgtttgataaaggccatagcaatctccattgtttttttattgtaaagcttgtcactattctagcatggaatttaagaatggtcagttgaaagtcagccgagaatgcgtttttatttgtaattaatatcatctgcgttatacttgagttgtgtaaaatagaacaaggagtgatcaatgtgaaaattatcgttgtcggttcatctcatggtggatttgaaacagttcaagaaagtttactcgattatccgggtgcaaccatccaatggtacgaacaaggcgatttcctatcgttcttatcctgcgggatgcaactctatttagaagggaccgtcaaaaacgttgatgatgtcagttatgcgacaccagaaggcatgcgggcaaaaggggttgaagtcaacctacaacaagcaatcaccgcgattaacgccgatcaacatacggtccaagtgaaggatttaaagaataatacaacgcgtgaagaaagttacgataagttagtcttgagtgtcggcgctgtgccatttgaattaccagtgccaggccgtgatttagagaatgtctacgcaatgcgtggccgtgattgggcgattaaattaaaggcgaagacagttgatccaaccgttaaaaatgttgtggtgatcggttctggttatattggcattgaagcggctgaagcatttgctaaagctggcaaacatgttacagttgttgatgtcttgccacgtctattaagtctctatctcgatcaagaatttacagatcaattaacggctgaaatgcaagcgcacaatatctatcctgcagttggtcaaggcgtcaaagaatatgtcggcgttgacggtaagctaactaaagttgtgaccgatcaagctgaatacgatgctgacttagtcatcgaagctgctgggattcggcctaacacaggctggttaaaagatacattacaactcgaccgcagcggccggattgaaatcaatgaattcttacaaacaagccaacccgatatttttgcagtcggggatgcaacggttgtgaaatacgcaccaactggcaaagaaatgccaattgctttagcaacgaatgcgcgtcgccaaggtcgctatgctgctaagaacttagtcaccgccaaccaaccggtacccgctgtttcaggttcatcagcattgagcgtcttcgattatcactttgcttcaactgggattaaagaaggaacggctgataaaatgggtgtgaagacccaatctgttttggtttctgaaacatatcgcccacacttcgtccctgaagcagaaaatccagtggtcgatttcaaattaacctttgatccagaaacacggcgtgtactcggtgcgcaaatcatgtctaaagctgacgtgacggcaaacatcaacgccatttcacttgccattcaaggtaagatgacaatcgatgatttagcatacgctgacttcttcttccaaccaggttttgaccgtccttggaacatcatgaacgtcgccgcccaaaaagcacaacgacttttagacaaataaagtgcaagcagttgtcaattgaagattgatggctgctttttgtgctgacatggttcgccaaataggcttgatgaagacggtgattgtcattggattcgtgtattcagctggtgtattgctcttaacggggcttacgcttggctattcaagtgtaagacgttggcttagaaagaatcgctaataaaaaaggattgtggatcgataaaaatatcgattcccaatccttttttactatattacccaataccgatcacataatatgcgagtttatcggcgtagtgtcgttggttattttgttgtttagcttgcttaaccgcggtgagattgtcggtgaccacgccgtctgcaccgaaatacatcatgcgttggacggcttgttgatcattgggtgtccagacaaagacggccttattttcctgatgtgcagcttgaatgaagtgactgttgacagttgtcatttcaacggcataaaaatcagcgttcgaaattggtgggccgataaaattaaaggggagaatgtagcccgtttgaatcttcggtgctgcctttttaacggcctcgacgatgtgccagtttaaggattgcaccatgtgaccgtgagcttcgatattggcctgatacttattcaggaaatgttgcaccaagccgggattatcggtggtgggtgtcttaatttcaatcagtagtttttgatgaagctgattggcgcgtgcaagatagtcatcaaatgaagcaattggtgcggattgccgatgttcatggacggtcattttagtcagttgcgccagtgttttagactgcggggtccctgagtgcccagtgagtggggcaagttggaagtcgtgaaagacgacgaattggtgatctttagtcaattgcacatccatttcaacataatcgggctttaatcgggtagtttttcgcagcgcactaatcgaattttggacgccgtctttttgcgaaacgccacggtgggaaatgcttagcggctgctgaatggttactgaacggagatagtcccaattataagtcccaacgccgattaaaacgcaatttgctacgaataataaccaacgaccactgagcggcacgcttaattttaaggttgcatagttgaacgtcggttgcacaaattgtgggtcggccaacaaataatcaatgacgatgaaaaagacggcgactgtcgaaagcaccaagttgatgagcatagcagcttgcaacaaggtcatgatgaccacggcacttggcagtcccactgatgtgtgggtttcaatcaacgcttgtagttggatgagtaggaaaaaagtgagtcccgtaaagccaatcagtgcggcaccgattaagagtagacgccccagtaatgagccagttttttgatgtgtaaaccgccaactactggtcaacgcttttttgaaagtcatctgctgaagaatgatgtttggtagggtgaagatcagccgtaagccgagatataataagcccaaatagacaagaatgaaaagtcccgcgacaattcgccgattcatgagaatataatccagaatgaatgccggtattttaaacttagtggcgtaaaagcgcgcttgtgaattaatggcggcttgatggccggtgacgagactgtcgacaacggccacatccgtgccgcgttgaattaattgatcaacggtgtgtgagccgatgtagccggcgccacctaatactaaaactgtcatcttatcattctcctcttcagttgactgattaacctaattttttagcgccatcggcaatttctgccacgtagaaacttggcgcatacccaatcttgtctgtataaactttagcaacattcgtttcaaagttgtcgacttggtctttagcaacaattgcaatcgcacaacccccaaagcccgcaccagtcatccgagcgcctaagacccctggttgttgccaagcggtttgaacgagtgtgtctaattcgatcccagtcacttcataatcaaattgcaatgacacgtgtgacgcattaactaatttgccgaaacgttcaaggtcgttgttcttcagggcttcgcgggccttcattgtccgttggttttcagaaaccgcatggcgtgcacgtttcaacaagttttcatcttgtagcatgtatgtttgtaaatcaaaggtttcgttatctaaatcgcccaatgattgaatatcattcttcgtttgtaaaatggctaaggccttttcacattcactgcgacgttcattatattttgaatcggccaattcacggcgtttattagtgttcatgataataatcacgttgtcttgcaaatcaattgggactaaatcgcaatccaatgtgttcgtgtctagtaagatggcatggttggctttgcccattccaacggcaaattgatccatgatgcctgagttaacgccgataaatttattttcaaccatgacaccggttttaacaaggtcgacacggtcaatttctaaattgaattggtcttctagaatcacacccattaataattcaattgatgcggatgatgataagccagcgccgtttggaatattgccttttaaataaatgtccaaaccactgtcgattgtgtaaccttgttcttgaaggtaaacaatcatcccttttggatagttcgcccagttgtgggccttttgataagataagtcgctgaggtcaaatgaaatgacacccgcatcttcaaagttcccagataataaattgattgtttggtcatcacgtttagcaacgactgcatatgtgcccaatgtaatcgcggttgggaaaacatgcccgccgttgtaatcagtatgttcaccaatcaagttaatccgacctggtgcgaagtagctcgcttccggtgctttgtggaatgcgttttcgaatgcggtatttaattctgtcatgttcatagtaaattcctcctttattaatcgctttcattttactaaacatttactaaaaaatcaatcttttttgttaactatcgctttcttttcattggttatgctaaactaagtaatagtaaacattgaattgagaggtgcaccttggcaacgatcaaagatattgctcaactcgctaacgtttcgaatgcaaccgtttcgcgggtcctaaattatgatcaaacactttcggttggcgatgagacccggcaacggattttcgaagccgccgaaagtttaaactatcgtaaaaacacgcgcaaaatgaaccagcaacgcggacgcattgcgattgttgaatggtataccgctaaagaagaattggaagatctatactacctctccatccgacttggcgttgaaaagaaactcaaagaacttggttatgacgtaacacgcttctttcaaaacgatccatttgatacgctccatgatgctacgggtgctgtggtaattggtaagtacagccctgcgcagattaagcgcctaaaaaaactcaaccacaacctcgtcttcgtcgacatgaacacgctcgattgtgaagtcagctgtgtgatgaccgacttcaaaacaccaattaaatccgtaatcaatcattttacaaccgccggcttaactaaaattggtatgttaactggtcaagagagcactgctgataatactaaattgggaccggatccccgttttattcattttaagacgttactcaaagctcaaaaaaactatcaccccgattggattttaaccggtgactttacacccgaatcaggttaccaactcatgatacaattattacaagaccaaagttccgatttaccagaagccctcttcatcgccaatgatgcaatggcagtcggcgctttacgcgccttacatgaatcaggcatcaaagtccctgaacaactcagcctgattagtttcaacgatacctcaatttgccaatacacgttccctactttaagttccgttaaagtttacactgaacaaatgggccaatcagctgccgagttattggttaaacaactcgccgctagcgaaattatcccccaagtcattacgattggcacgacgctgacactacgcaatagttcaaaataataccttcagcccaccgatgatcaattcatctcgtgggtttttatcttgtctcaaatcaattttcattaataggagtatctcttttgaaaacgaaaaaaattagacgaaccatcttaaccattgctatcttggcagtcggttatctcggtggtcgcaacaatgtcttacaaaatgtgttccctgctacagttgctactgagcaaccagctaaacaaacacccccagtcattcctgattatcaagccattgctgatcaagattttaaaagcggatctgcggcctatctaccaattaataacgatcaaagccaattaacagcaacggattggcaaggtgaaaaaatcgtctatgggcaactcgaccagcttaaccgaacaactagcgtcacagcttacttatcaaagcggaatctgggcaaatcagaaggccggacgcgccaaatttggaatccaacgggttggcataatcaacctctgattgtcaatgaccgccgaatcacaccgcaaaatcgtggccacttgattgcttatacactcacttttaattttgatcagaatggtaactttcaagctggtcaaccaggcagtttagataatccacttaacctcgccacccaaagcgcgtacagtaatcagaaaacgatgcagatttttgaagaaaaagtccgcactgcgctcgaagcaaacaaaaaagtgatttacaaagtcaccaccgtttttcggggtaatgaactgatgccgcgcggttactgggttcaagccatttcaacagatggcacgctgaatttcaacgattacgtctggaatgttgaacctggcgtcgcattcgattacatgactggtcgttctcacttagatgctagcatgcaagtcaaagacggtcagaatattgttgaccgcaccaaacaacaagtcaaacaatttttctaaacaaaaaaaagaggtagcaaccagaataattctagttgctacctcttttgctagcttatttttccattgccttacgcaatgcagcggctaatggactttccgctggttcatcttcttggttcactttttgaatcaagcggcgttcttcatgtttagagattttcttcttacgatctttcttgtcgagcatcttttcggtcgtcccatcattaagacaccggaagtatgcgccaccttgcccttcaataatcaccattttcttgtgacattgtgggcagcggtggttggaaaccttcggatctttccgacgccgatagtgacagtttgtgcagatataaattttaccgtcacgcgtattgcgttcttttaacggatgatcacattccggacattttttattcgtcactgcaaaatcgcggtattccgtctcactctttttaatctcaccgaccaaggtcttagtggcaccctcgatttcagtgatgaacgccttcggattttcttcgcctttggcaatcgcttcaagcgactgttcccattttcctgtcagttctggtgaaaccaaggtctgattaaccaatttcaaaagttgctggccttttggcgtcactgctaaagcatgaccttgtcgttctaggagttcactacggactaatttttcgatgatttcagcacgagtggcaggcgtccccaaaccgtagtgttccatcttcccgagcaacgtcccttcagtcaatggcttaggtggcgtcgtcaattgttctttaaccgcaaaattagcgcgaactaccatcccttctcgccagtcgaccgtcgcggttggttgcccctctttatcggcagcatgccaaccttgttgcacgacttttgtttgcttaaacgtaaaggtttgatcaccaaacttaacggtggctttcgtaacagctgtcacgtatggatcagcaaataaccctaaaaagcgttctacaatcaagcgatacatgcgtagttcatccgtcgataatttttcggcacgaacgggttcttcagttggaattaaagcgtagtgatccgttactttgccatcattaaagacggctttttgtttgacctgactgccttgccccaagtattgcttagcacgtggatcaaatttgactaatgccgacaaccgttccttcaaagtcccttcgatatctgttgagagatatttcgaatccgtccgtggataactgacaactttatggatttcatacaatgattgaatcaaggataacgtctttttcgcggataagccatactttgcattggccacttgttggagttccgttaaatcatatggtaaaggtgctgattgcgatttctgcgttgttttgacgctgaccacttggcctttggcttgttgcaattgtgcaactaagtcgtctgctgcttggcgcgtcttaatactttgcgggtttgctaattgtaaggcggcttgctgttgatcgaccgtcaagtgaattgtgtaataggtttgcggtttgaaacgattaatttgttgtgccgtttcgttcacaaaggctaacgttggtgtctgcacccgaccagcggataaattatcttcatacttggtcgtcaatgcccgtgtcacgttcaagccaatcaaccaatccgctttgccgcgtgctaacgctgatgcgtacaaattatcgaattgcttggctggttttaagtttgcaaaccctgctttaatggccttagtcgtttgcgatgaaatccagagccgttcaaccggcttatcgaatttaatccattccaaaatatagcgcgcaacggcttccccttcacgccccgaatcagttgcaatcaccgcacctgaaatatctttgcggttggcgaggtgactgatagcttttaattgtccacccgttttaggcaatggctttaaaccgatatgcttgggaataatcggtaagtcttccaaacgccattgttgccattcttttttgatatcctctggtaattgcagcgataacaaatgcccaaacgcccaagtgatgacgtattgatcgccctcaaaataggttttagttttctgagttgttcctagaactttagcaagctctttggcaacactcggtttttccgtgataactagttttttttgcatttaaaattcctcttacttcaattgatcaaaatagtaactgactaatagtataacgcatgttgagaaggaacaacccagaaatcgcgaaagtatcataaataataatatttcaacagccaaaataaaagattctaagaaactgaattcttagaatattcttttttatttggccgtacttggtactagtttattagggataacccacccagaaaacataattaagttacccaaaacgattaaaaaaacaatcattaatactatcaatttttgatgatttttacttttccccttcattacttatgctacctctttttcgattatttcgactaagaatactgtttaattcaattgcgctaaataataataaagttggtacaataaagaatcgataccgcgtttgaatctcaatcaataaatgaactagaaaataaccaatcattaaaatcataaaaagttgtcctgattgccgttcctgaaataataacctaaatacgcccactaccgatagacaaatcatcaacgtataaaaaagcatctgcacggctagtaacacttgataatttttttctgtcactttttgccgtgcaccactccaacttaatgcagaatcctgacaggaccacatgataaaactcttttttacaaataatttcattaattgtgtcttatcagaaagccgctccttaattatttttctcccaaccttatcacgttgccgaccaatcgggtatttatccaataattgtaagtctttattcgaatacattccgttggtttcataattaatccccgttacgaatttccaagtatttgaacggttttctaatttatattgactaatctgtgttgcttgaacactgacatttacaccactaacaactaactgataaccacttaaaattgcaattatcaatattaatttagttagccagtgactatgatatttagcatggtttttggtaaattacaagtttaatccgaacaagctcggaatttctcaataacattttgtctctggttaatctttaatgggtaattattaatcaagtccagtaaagtaactgaagtttgtacactttgacaagaaccagcgtaaccttcagttaaaataccggttacaaccacgttccatggtaaataggcatgccagaaataaacatcacgttacatttatcctcaagtacttggtggtttgaaaactcttttccatggtcaacggtgatcgatttcacttgcgaaccaaagacttccataatactatcaaatgcagtatttgatgcctctgaagtaggatttgtcactttaagtgccgtaataaacatgatttacattcaataaatgtgcccaaataagctttagactcacctcgtctttataaaacagtgtcaccttcccaatacccaaaatcataacgattattaacattgattggacgttatttaattgatttaccagtcataaatatcaatcgtttttctttagtgagtttctgataaatattacggttcggtaaattggttaagtcaaatttgagttgatcagtattaagccgatgataaatgaaaccaatccaaaattaaacatattagcaatcatttcaagtgatcaggtaaatcttaattttcaatcaagtgttgtttatcagggtttaaaattggatagcgaccgtaagcttttcgttttaatttgacatcaagctgcctaattcagcattataagagcgaatacgttgtaattcatagtgaatagttgatttagcagcgcccataacttaatactaccttcaaagtcaagttgtcctaatcgtccacgttagaattgtgttaagaagtgcccaaagtaatatcctcctttatgattggattaaattacaatcattactaagagattactttgggctttttctgttcgaattaattttagaacttgcaaaaaaaacctcataattattagactctttgtccaacaattatgaggccctttaacttcaagctctattgatatttctaaaatacattaacatgatatttacttaaataccattagctaaatcacgtgcgaattttgccttagaaacacccatagattgcagatacccataaggatcaacatgatcaacttcatgataagcattagaaatccaaagatgtgttttaatgccttttccatcttggtcaagcttatatgatattcctgcttggtcagccaggaatcttagcaaccgtacatatgcctgataatcctttgcaaacgttgcttggtcgttagttctcgctaactctacttgagcaaaagccttaccatttcctgttggaccacatccccagctcatccgtcctactggtgctgtctgaataatccgaccaccgtgaccaacccaatgagtaacgtatgcactggtccagtgatctttcatgtaagcaacttcattttctaatgcattagggttacttgcttcagctggtgtaccagattcatgtgcaacaataaattcattggaactagtattattaggtagtccactaatcatatctttattaactgtaatcgttttagcatgcatatcagtagctgaaacgtattgattagttccaactctataccaaatggcaccagtcttatcaattgctttttgagtgatcacccaactagaatatactggtagatttttaactttattattgaggctatcgcgcgtaacagcgccattatagtttgaaaccatcagcacaccagaatatccttcaaaacgttgaaacatactttcttgttgatttgtgacttcgttagcattgacaaattgatctgaactaactttgtaccacttagttccataaccatctgtaccaataccgctaacttgccagcgggtttgatacttcaaatgaccattgactttaccaactgaatttctagtatctgttcctttattatttaaaacagtaacaattcccttttgatcttgaatgttattaatgtgtttttcggtaccatctagcactctcacatcttttgaagaaagatattcttctccgctaaccttataataaacagtcccatcagcggcttggactgttgaagaagctaaccaattggacttataaggtaacttacgagtgatttgtccattatttgtcataagattaccaccagcaccgttagtgattgacagcgttaccgttccaattttttggggattatgaaatactgattgaccctctaaataacagtcactagcacggatataagtatttgttgagaccatataccaaacatccccaaagacatcagtcccttttcggaaagtttgccatctggaattcatgcctaagtagcggaacatctcgccagaattagaaaccatagcagttccctgggctgctttgacttttacaatacctttaatatttgaggttgaaaccatcatattggttccgtataaaaagacatcttttgctaaaatatattctgtgccactaactttataccaaacctgaccagatttatcgattgcttttttactgattaaccaggctgacttaaatcccagtactctagttctagcaccggttttctcatccattaatgttgttccctgtttattcttaactctaattttaccttgaatatttgtaatctgcgtcaatccagacacttgtgccgcttttgtttcaccctttagggtctcctgtaccgattgagcagagctactactagcagcttgagtgttactctgtgtgtcagactgagttaaagcactcgactggtctgaacttgatacttgattactagcactcgtagtaagctctgattgacttgtactcgtcagttgcttagatacaacgttggcttgactcacattttgagtagctgcttcagcagaatgcacactgatcacctgcaataaagcaatggaactgaccattattagtgaaattttctttttattcaatacgtaaactccctattttttccaatcgactagcccgtcattaaaatgatttttatcggtaaacttaaatgtttcttgctgcttgtctttaccagcatttttaaccttaagtatttgttcaataatcaaactatctttcgtttcctttaaaatttgataggtcccccggttagtcataccactcgcatccgatacctgaacaattgtgccatcttcattatatgtaactttagtatcgttactataccaggtaccaagtattgaatattgaaattttccatccgtatttttcccagaagttgtcgattgagcacttgaacttgtcgccgattttttagtactgctcttttcgtttttttgtaccgttacactttttttactagaacttaccttggcctgatcagttttattcccacaagcaaccaacagtaagctcattaaaataatagtgacccccacgcttcttttcttcaaataaatccccccactttttcagttcctataaaaatatagcatatcttaagaaatattcaaatattttccttcacatctttaattatttaggcagttactcttcgataataaactggtttgaaaataaacaaaatactgtcaaaaaactgattaaaaaactaattctagcgaccactgtatatctataactgacatcaatttgattaatcccttttttcaaattaagacttactgtcccaaattttgttctatcaggtacggtattttgattattaattctagtaataattcctttataataaagaattggtaatttaattttactattctcagttgacttaaccgtcattttaaaatgatccttactaatgattctcattggtttaatctgaccaccattgtattcttttttaactattagatgttctgtatttaaaagagccgctttaggatagtaatctttttgtctaaagcgtttgattttatttaaatcattatttctgattactgataattcagggggaactgatgtctgggcatgccaaagaattctagcacctgaaatcaacgttatcatcaaaatgattatgactaacgacggaactaatctccagaactttcccatatatttagccccaactgaacataaatgcgctaaataaagtgctacaaaaaagcaaaaaatatttaaaaaacgaccaggatattgaataatgctgactggtgtttgctgcaatgcccaccacggtataaccgtcgtagtcattattaaaatcactagtgaaattatccctatcgttcgatataatgttttttctaaccagactgtcataagtattattaccaccgtgctcagaaaaacaatccctatcgtataggttctaaaatctaatgaaaatgaatacctaattaattgttctaagctcttggttacttgcttaaaatcaaatggttgaggcatattaatcgtttgaaatctttcttgttccaacattggtccccaataagccattgtcatagtcaaacaaccagctacaaataacaaaaattttttcgttatatagattaagtaagtacgattaaattttttttagcaggatacgcagatcggtagaggaaagcatatgcaagcaagagaattgattcaaacatttattgaaaaagtgattatctttcaagacacactttataaagcagaagaccaacagtacttatttaatctcgtcttagaccttgttggtgaagaggacagtaacgttgcggtgactgatcaaagtctcatcggattaaaggacgcattgttgcgtcttgcagttgcgaatagccggattgagaatttagcggcagaacaagatattttaggggcgaagttgatggatttggtgacgccattaccaagtgcggtgaaccgccatttttggcatcaatacgagagtgatccccaacaagcacttgccgacttttatgaattaagtcgggccaacgactacgttaaagtggccgcaatcgcgaaaaatatcgcttatcaagtgccgacgcactatggcgacttagaaatcacgattaatttatcgaagccggaaaaggatccgaaacaaattgcgttagccaaaacgatgaaacaaaccggctaccccaaatgtcaattatgtctggaaaatgaggggtatacggggcgtttagatttcccagcacggcgtaatcatcgcatcattcgttttgaattggcaggtcagacttggggcttccaatattcaccatatgcttattttaatgagcattcgattttccttgatggtcaacacgaaccaatggtgattaatgaaacgaccttcaaaaatttattacagattgtgaagcagttccccggctatttcgctgggagtaacgctgatttaccgattgtcggtggttcgatcttaacccatgaacattatcaaggggggcgtcacgattttccaatggctaaggcgccaatcgagacaccactacattttaacgggtataatgatattcaggcgggaattgtgaagtggccaatgtcagtcattcgtttgacgagtgcgaatgcaacgcatttggaaacactcgctgcacaaattttaactagttggcaaaattacagcgatccaagtgtccaaatcttagcccactcagaagacggcacaccacatcatacgattacgccgattgcgcggatgcgagacggtcaattcgaaattgatttggtactacgcgacaatcaaacgtctgcagaacatccagatggaatttatcatccacatgcagatgtgcaacatattaaaaaagaaaatattggtttaatcgaagtgatgggcttagcaattttgccaccacgactcaaagatgaaatggctgaggttgaacactatctctgcgatcaaccaaaccagatggccgcttaccatcaagaatgggcagatacgattaaagccgctaacacatcgattacatcagataacgtaacggaattagtgcggactgaagtcggcaaagtgttcatgcgcgttctagaagacgctggtgttttcaaatgcaacgaacaaggtcaggcagcatttattaaatttacgcaacatgtttaacctataaggagggacattcatgaagtattggcgagaagcatttggagaaataaatggtcaaacggtttggcagtattggctagagaatcgtcaggggtatcaattagccgtgacagaatacggcgcaacgattactcacttggtgatgccggatcaaagtggtcagatggccaatgttgtgattggctatgacaccctagcggattttgtaaagcaacaagcttattttggtgcgacagtgggacgcgtagctggccgcatcggtcaaggtgcttttacactcgatggtcatgattatcaagcaccgattaataatggcgccaacacgaatcatggtggccccaatagttttgaatcgcaaatctggcaatcatcagtggttgaaaaagatgatgcgattagtgtcgttttcatgttaacgagtccagatggtgaaaatggattccccggtaatttagcggtgaccacgacgtatacgctaaatgaggccaatgaatggctaattgactatcaagcaacgactgataaaaccacgttgtttaacccaacatgccatgtctatctgaatttgacgggggactttgatcaatttgttggccaacacacattgcaaatcgatagtgaccgttttggtgccattcaaccagacggcttaccaaccggggaattagtcccagttgcgggctctgtctttgatttacgtcaaccgcgagctttgcaagccgcttttgatagtgaaaatacgcaaactaaattggtcggtggttttgatcatccattcctgttgaatcaaacgccgggtaaatcggatgcgattttacgcgatcccgaaagtggccgctcgatcacaattgatacagaagggaatgcaatcgttatttataccgccaatggcttcggggacgaaccaaacttaacaaatcaggcaattcaaccccaccaagcagtggcgattgaagcccaaatgatgccagatgccatccatcataccgagtttggtaatattgttttgcatcctggcgaacaatatcaacggcggacccgatataaactcaattaatttattttacgcttgcatgcggttacaaaatcgcgtataattgacttgtttagatgaccgattctggtggctagataataattgtgtatttaaaaggagtaacatcatggaaaaaggaacagtaaaatggtttaacaatgaaaaaggtttcggctttatctcagcagaaggtcaagacgatatctttgtacatttcagtgcaatccaagacgaaggcttcaagtcattagaagaaggccaagcggtcgaattcgacatcgttgaaggcacacgtggaccacaagctgcgaatgttgtaaaactttaatttagaggaattaaatacgactattctaatttaatttaattaaatttaaattagaataaaatcgttcatgtttataaaaaaatagcataaaagtgttgacttcatttatcatgtgaactatgataagcacataagttaataaagcgattgaaaagcgcagtagaattagtaaccactattacagagagtcgggatttggtgagacctgacatatgtttctaagtcgaattacactttttgttttatcaaatcgtacgttgaatttacgttaaaatctagagtgatattttgaaagtgcactttcaaaatataacacgggtggtaccgcgaaaaaatgacatttcgtcccagtaatctttattttattaaagattgctgggacttttttaatttaggaggaaattttgatgagaaaaaatattattgatgaattaacatggcgtgatgcgattaaccaacaaacagatgctgaaggattgcgtgaattagtagaaaacaacaagatttctttatactgtggggctgatccaactggtgatagtttacacatcggtcatttgattccattcatgatgatgaagcgattccaattagctggacatcacccatacatcttaatcggtggtgggacaggatcaattggtgatccaagtggtcgtaattcagaacgccagttacaaacaatggaaaaggttcaaaaaaatattgaagctttatcaaaccaaatgcggaaattatttggtaaagatgccaatgttacttttgttaataactacgattggttatcaaaaatctcattgttggactttttaagagattacggtaagaatttcaacatcaatacaatgttagctaaagatattgttgctagtcgtttggaagtggggatttcatttactgaattcacataccaaattctacaatcaattgatttcaaacacttacatgatgaacataacatccaactgcaaattggtggggctgatcaatggggcaatattacttcagggattgatatgattcataaacttgaaggtagcgacgaacccgtatacggtttaacaattccattaatgttgaaagctgacggaactaagtttggtaagacagcaggtggtgcaatctggcttgacgctgaaaagacttcaccatacgaattctaccaattctgggtaaatcaagatgatcgtgatgttattaaataccttaaattcttcacattcttagaagaagacgaaattgaagaattggcacaaaaagttgcaacagaacctgaaaaacgtgaagcacaaaaacgtttagcacaagaagtgacacgttttgttcacggtcaagaagcattagatgaagcggaacatattactgaattactttttgaaggtaatatcaaagctttagatgttgttgaagcagaacaagcttttggtaaagcaccatcagttgaaattagtaaagaagctaaaaacattgttgacttcttagtggatacaggtattgaatcttcaaaacgtcaagcacgtgaagatgttcaaaatggtgccattacaattaatggtgaccgtatccaagaaactgatgcgatgattgacccgatgactagctttgatggcaagtttgtgattattcgccgtgggaagaagaattacttcttagcacgtgttactgactagagacgttccaaaaattaaatgaaggcttttgtatctatactgaatgttactgggttcttcgtgaatgtagatcatatagtataaccccaaaatacaactgcaaaggtagccgtcaaacgttgtttgacggctatttttcgtactctaaaaaatcggaatcgctttcatatgtttgcttttatggacaatgagcgtattctattgattggggttatactaagccgaaaggttcaaccttttttgtagtaattaaataataagttgggagaaatcagcatgattcaaaccgtaacagaacagaacatcgcaagctttgttcaaacacaaccgttagtgattttagacttttgggcggattggtgtgcaccttgtcggattatgacaccgatgattactgaactacatgaacaattagctgatcagtttggcttaggaaccgttgatgtagaggatcaagcagcgttagctgaacaatatgcgattcaatccgttccaaccctattaatcttcaaaaatggtcaggcgacagaaaaggtaactggcgcttttccaaaagagaagttaaaaagatacttagataagaaaatcgctgaaatgtaatcagcgcattaatagtagcccgcaactttcattggagagttgcgggtcttttttgataagtagaaataaaataacccccttagctattgtctaagggggagatgattattgacgaaccatgtggataacacgttgataaaggattaatgcgccaatctcacaaagtaaaatcaaaacagctaatggaagataggtataactgcccatcacgccaactaatggggaaagaaaaatgccgaaaacatacataccaagtccaagcactgaagaagcaatccctgcatgttgtccttggcgttgtaaggccagtgaggtgacaacggcattaattagaccaagtgttgcgaccactaggaataaaccaattaaagctaaccagagacgattagagccaaagccactaattaagacgcagatggcaccgattaaaccaccaattaagccgatttttaattgttgtaattcatcaaaccaatggattaaaatggtggacatttcagccattaagataatcccaatcccattgattccgtagattagactgaaagttgatttagaaagactaaagacattttgaagcatgaaactggaacctgaaatataacagaacattgccccataaacgaggccttgaattaaaacaaataggatgaatgggcgatctttaaaaatggcttgaataccaaggcgcgattgttgtgccgattgcgcgcttgtggatactgtgtgtgtttctttgaatcccaaaatgatgcctaacaatagaagaaggccaacaatccctaaaaagccgaaaataccttcccaagaggtgaaacggagcaaagcacttcctattaatggtgaaatgatggggaagataccgttgattgccatgagtaaggcaatgaattttgtcaattgtttaccgtcaaataaatctttagcgactgctcgagtaatgacctgtcctgcagagctcgctaacccttgaataaaccgtaaaaggaagaatagccaaatattgtgggtgactaacgataatagacacgctgtaaaagcaagggcggttccgattacgagtggctttttacggccaacacgatcgctccaggcacccatgaagatggggccaatcgcaagtccagccaaacacatagttagactcagttgaatcatggaagcagatgaatgaaaatcagcttccataatcggaaatgctggtagatacatatccactagtaggggtccataagcactcagtgaaccaagtaaaacagataaccatagtgttcttttttttgttaaaaccatgttaataaaccctcctaaataaaaaagtgtaaaaaaatagcccgttgaaaacgtagctagcgccgaacgaatttaattaattactattcatgttgcttcttagttacactaacataagaagtcgggtttgtggcgatatatgagcaatttttaatatgtaaatggtttctatttcagtttaaacaagttatgatggagataatgaaaaaagttgtcgaatgaggttttgccatgaaaattgcccaaaaaaataaaatattagaaacctgcctaattgcgggacggattatgattgaaagtggttctgaaatgtaccgggttgaagatacaatgaaccggattgcttataatgcaggcattcaaaagagtgttgtgtttacgacaccgaccggtttatttatcggaattgaaaatcaaccttatgtgcaactaggcgctgttgcggtgcggacgattaaccttggaaaagttgaaaatgtgaatactgcttcacggcaatttgcgactaaggaaattacgttggatcagttaatgttacggttaaaacaaattgatcaggatacagctcattttccgttgtggttacaaattacagctgcagcagtcatttcagcgtttttgatgattattttttctggtgaatatgattggttagacatcataccgtcagcggtagccggtgctttaggctatgccgcctttgcggcggtcaatcgggtcacaacgattcgctttatcggtgaatttttaagtgcgacagtgattgggatagtcgcctatctattaactaggtggcacttaggagtcgatatcgataatattatcattggggctgtaatgccattggtacctggtgtagcgattaccaactcgattcgagatttgctagcagggcatttattatctggtatggcacgtgggatggaggccatcctgagtgcctttgcaattggaacagggattgcgctcgtatttagattctttatgtaaagagaggttcatcagatgccatattgggttcagtttattattcaagcgttatttagttatatttcaacggttgcgtttggaatttgtattaatttaccaagacgcgcattattatggtgtggctttgccggtatggcagggtggcaggtctattggatgctctttaactttggtagcgggcggatgcttgctaatttgttgggtgcgttagctgttgggatttgtggcaatattatggcccgttataagcggatgccggtgattatctttaatattccagggttagtacccttagtgcccggtggaactgcgtatcgtgcgattcggaatctcgtgctaggcaacttaaatgaagcttcgacacaaggtgtttcagtaatcatgattgctggtgcgattgccgttggctttatgttagcgcaaattttagccgatataacacgaaaacgagcgattacgccgaaatgggtatcgcgtcactaaaaagtatgctataataagtttatgcgatgagtcgagtaagtctcggtaggcaactattctgcgaaggcagctaggagacccaaagatacaggataccacggttattcatttaaccacttgccgtattgcaagggtgttttcgcccgctgtgttgtggagcacaaggtgtttattcttcggaatactgtgaaaaaagccccttccgtcaggaaggggctttttttgtgcgttcattttcttgcatgacagcgttactgatggtgcgatggtcgactaattcaccaatccgttttagatgtttgagatgtgcatcgtagtgttccgaaaaaacgagcgcgtataaaacatttaataggaagatgatggaggtattaatggtaaagttgccgattttcgagtagagtttttcacgggttgtaatcggtaaaagcaagtgcattcttgcgaaagtcgattttcaccgatactggtaatcgcaatcgtcgggatgttgcgggtgcgtaaaatagtgttaagtgctagtaagttgggattctcgccagaataggaaattagaatcgcgcaagcatccggactaagattataggcatcgtagttttcctcgccacgaaccgcagatagcgtaacgtttttttgaataaacaggtgtatccttcttgctatcgccaccacactattttgtgcttgcgcactgagaagaacttcgttctctcaaaactgcataataagtaatatttcatttcaaaagcctaacattgcacctttggttaagtcctcgaccgattagtactagtccgctccatacatcgctgtacttccactcctagcctatctacctgatcatctttcaggggtcttacttccataaaggaatgggaaatctcatctcgaggggggcttcacacttagatgctttcagcgtttatcccgtccatacatagctacccagcgatgcgcctggcggcacaactggtacaccagaggtatgtccatcccggtcctctcgtactaaggacagctcctctcaaatttcctgcgcccgcgacggatagggaccgaactgtctcacgacgttctgaacccagctcgcgtaccgctttaatgggcgaacagcccaacccttgggaccgactacagccccaggatgcgatgagccgacatcgaggtgccaaacctccccgtcgatgtggactcttgggggagataagcctgttatccccagggtagcttttatccgttgagcgatggcccttccatacggaaccaccggatcactaagtccgactttcgtccctgctcgatttgtcaatctcacagtcaagctctcttatacctttacactctacgaatgatttccaaccattctgagagaacctttgagcgcctccgttacactttaggaggcgaccgccccagtcaaactgcccacctgacactgtctcccgccacgctaagtggcgcgggttagagtggtcatacagttagggtagtatcccaccaacgcctccatcgaaactagcgttccgatttctacggctcctacctatcctgtacaaactgtacaaacactcaatatcaagctacagtaaagctccatggggtctttccgtcctgtcgcgggtaacccgcatcttcacgggtattataatttcaccgagtctctcgttgagacagtgcccaaatcattacgcctttcgtgcgggtcggaacttacccgacaaggaatttcgctaccttaggaccgttatagttacggccgccgtttactggggcttcaattctgggcttcgcttacgctaactcatcctcttaaccttccagcaccgggcaggcgtcagcccctatacgtcatctttcgattttgcagagacctgtgtttttgataaacagttgtttgggcctattcactgcggctgacctgacggtcagcaccccttctcccgaagttacggggtcattttgccgagttccttaacgagagttcactcgctcaccttaggatattctcctcgaccacctgtgtcggtttacggtacgggtagtttatttctcactagaagcttttcttggcagtgtaacatcaggaacttcgctacttaatttcgctccccatcacaacttgtccttaaagaatcaagcatttcactcaactcaagacttgttgcttagacacacatttccagtcgtgtgcattccttagcttcctgcgtccctccatcgttcaaacaaaataaactagtacaggaatctcaacctgttggccatcgactacgcctttcggcctcgccttaggtcccgactaaccctgggaggacgagccttccccaggaaaccttagtcatacggtggatcagattctcactgatctttcgctactcatgccggcattctcacttctaagcgctccactagtccttacgatctagcttcatcgcccttagaacgctctcctaccgcggacacttacgtgtccacccacagtttcggtattatgtttagccccggtacattttcggcgcagcggcactcgactagtgagctattacgcactctttaaatggtggctgcttctgagccaacatcctagttgtctgtgcaccgccacatccttttccacttaacataaattttgggaccttaactggtgatctgggctgtttccctttcgactacggatcttatcactcgcagtctgactcccggaactaaatcaatggtattcggagtttatctgaattcagtaacccatgacgggcccctagtccaaacagtgctctacctccatgatccaatattccgaggctagccctaaagctatttcggagagaaccagctatctccaagttcgattggaatttcaccgctacccacacctcatccccgccattttcaactgacgtgggttcggtcctccagtgtgttttaccacaccttcaacctggacatgggtaggtcacttggtttcgggtctacatctatatactcactcgcccatttcagactcgctttcgctacggctccagcttttcactttaacctcgcatataaacgtaactcgccggttcattctacaaaaggcacgccatcactcattaacgagctttgactaattgtaggcacacggtttcaggatctatttcactccccttccggggtgcttttcacctttccctcacggtactggttcactatcggtcactagggagtatttagccttgggagatggtcctcccggattccgacggaatttcacgtgttccgccgtactcaggatccagaacggaggttaagttgtttaatctacgtggttatcacactctttgactcagcttcccagctgattcgattacaacttaacttggtaactccaatgttctgtcctacaaccccaagaagcaagcttcttggtttgggctcttccccgttcgctcgccgctacttagggaatcgatttttctttctcttcctgcaggtacttagatgtttcagttccccgcgtctaccttcattaagctatgtattcacttaatgataatacccgactaaaggtattgggttcccccattcggaaatctccggatcaaagcttacttacagctccccgaagcatatcggtgttagtaccgtccttcatcggctcctagtgccaaggcatccaccgtgcgccctttataacttaacctaactttacctacggtaaagggttattatttgagtttagcgatatgaactaattcatatttctattaaaaaactctttaaaacgcaatgttttctcggcttttaaaactaatatattacttattatccagttttcaaagaacaaagtttcattgtatatacctaacctcttgtagtttgttaatggttcattataacatttaaaacaaaaacagcccccattatctaactagtagataatgggggctgttttaatagtcttttagaggggttattgtaatttttatagaccctatacaaacatattttgtaaaaagccttttttctgttctttcaacaaatctaacttacgttgatgaagagtgatagtgttgtctaactgtttgaaaaataacccaattttttgttgacgacttttgtctcgcgctcttcattatttatcacgatgataaaaatcttttgtattaaagaagtcatttagaaccgtgttctcaccagtcattgtttcatgtaaacgaataccatcgacatttatccgcgcattacgataataatcatttgttaattgaccccatgatgtctgtgacgcatcaacattatcgaaaatactgaaaccgctactcttaagataagtgtactttgcattatcatttgtataatttgtaaatgagccaatatctgctccaaatgggaaaatcaatactggtgttttaccaacaattggttgtacttccttttgccaaagtgcagtgtcctttttgatatcatcaacactggccgtagtcatatttatatgaccccaggaatgcgatgcaaactgccaaccttcctttttcatagcgttagcaacctttgtcgctttcttagcttcgcgatgtgtcttttttgtatcaccatattgactctttgatgaacgataacctagcgccccattataacccgtttcagcaatcacaccctttgagccaccgtatgagaaatctggatgctttttgatgaaggtatcaataatcggtaccatgtcataatcaccaattttcttctgaccattattggtatattgatttttaacatcaccttgcttattgacgactaatttatctgcaaatccagaattcttcatatactcataatagttaacatcatcctgtgatataattaaaggcttcttgccttcaggtaatttgactggtttgaaagtcaccttcccttgtttatcaatcgaaatgatatctttaaagttaattaatacatagccattatcatataactgattcagcatcggcataaattcgtcgatggtcaccatataatctttgtatccctgtgcctgcttagatgagaaagctttaccaggatcaacaattagtgaatgataaaaaagatgtgaaatttttgtcggatcattccacgtgaccaactttgactgttgcttattaatactcttttttagatgatcaactgttgttcctttgtgccccgataacactgattttgcttctttatattggtactgttgacttaatgattttgcctgctttactgtcttagttgtttgactatcagtttttgcagccataacatcatcaccaatattgccatataaccctaagcctgcccccaaaatcaacccaatgacaagactagttatcttgatttttatcacagctactcccccataatttttatgaatattaaacgacaagttagtgccattatatatcttattacctcaaaaataaaattattcctattgttttataaatagtaaagatatcaaaaatgcgacataatcaaacaaaaaaggagtgattaaaatcactcccaaaaaaaatatttttaatgccacaatacctatttattgcgcatcatccttaaacttattatagtaatttgctcctgggaatacccagttagcacgaccgaatatcttgattgtcgctggaataataatcagacgaaccaagaaggcatcaaatagaaccccactggctaatgaaataccaattgacttaatcgttggatcttcaaccaaggcaaaacttccaaagacagcaatcataatcaaagcggctgtaataatgactggaccactctcttgcaatcctgttttaacagcccgatttgtatctccagtggcaatgtatgtctccctaatccgtgagaccatgaacacttcgtaatccatcgccagaccgaagacaattccaatcataatgactggcaaaaatgcaataattggtgatccttcactaatatggaaaacaccatcttgcataatcaatgtcgtcaatcctaatgatgcaatcaatgataaagagagtagacctctcaaaactaaacaaagtttcgacttcgcaaatgtacaaggttttccgtattattccttagaaaggaggtgatccagccgcaggttctcctacggctaccttgttacgacttcaccctaatcatctgtcccaccttagacggctggctcccgaaggttacctcaccggctttgggtgttacaaactctcatggtgtgacgggcggtgtgtacaaggcccgggaacgtattcaccgcggcatgctgatccgcgattactagcgattccggcttcatgtaggcgagttgcagcctacaatccgaactgagaatggttttaagagattagctaaacctcgcggtctcgcgactcgttgtaccatccattgtagcacgtgtgtagcccaggtcataaggggcatgatgatttgacgtcgtccccaccttcctccggtttgtcaccggcagtctcactagagtgcccaactaaatgctggcaactagtaataagggttgcgctcgttgcgggacttaacccaacatctcacgacacgagctgacgacaaccatgcaccacctgtcactttgtccccgaagggaaagctctatctctagagtggtcaaaggatgtcaagacctggtaaggttcttcgcgttgcttcgaattaaaccacatgctccaccgcttgtgcgggcccccgtcaattcctttgagtttcaaccttgcggtcgtactccccaggcggagtgcttaatgcgttagctgcggcactgaagggcggaaaccctccaacacctagcactcatcgtttacggcatggactaccagggtatctaatcctgtttgctacccatgctttcgagcctcagcgtcagttacagaccagacagccgccttcgccactggtgttcttccatatatctacgcatttcaccgctacacatggagttccactgtcctcttctgcactcaagtttcccagtttccgatgcacttcttcggttgagccgaaggctttcacatcagacttaagaaaccgcctgcgctcgctttacgcccaataaatccggacaacgcttgccacctacgtattaccgcggctgctggcacgtagttagccgtggctttctggttggataccgtcactacctgatcagttactatcaaatacgttcttctccaacaacagagttttacgatccgaaaaccttcttcactcacgcggcgttgctccatcagactttcgtccattgtggaagattccctactgctgcctcccgtaggagtctgggccgtgtctcagtcccagtgtggccgattaccctctcaggtcggctatgcatcacggtcttggtgagcctttacctcaccaactaactaatgcaccgcgggtccatcctaaagtgatagccgaaaccatctttcaaccttgcaccatgcggtgctaggttttatgcggtattagcatctgtttccaaatgttatcccccactttagggcaggttacccacgtgttactcacccgtccgccactcactcaaatgttatcaatcagaagcaagcttcttcaatctaacgagagtgcgttcgacttgcatgtattaggcacgccgccagcgttcgtcctgagccaggatcaaactctcgattaaaagtttgtagctcttgttttgttacttaatttatttgctagcgaaattgactttgcaaatatgttttgtgccccgaagggcgaccctacacatttggtttgtcgaaactttgttcagttttcaaagatgaatgggtagtgggtaacaatgagtgtaaattaaataaggcacaaaaaaggatgcttaaggataaagaaatatataatcatttcaatttagaaaatattcccagttccatcaaaacggagctaaacaagatagtgcatgacatcgatgactaatactttaacaccaaacagaaaggggctatgaatatatagggtctataactatcaaatagtccatttttttagtataagagcagtaaaaccagacgtggaaaccacgtggtcttttagttgattcagtaaaagaagccgaagccaaagtgaagacgttggtttcggcttctttggcttttaattgcgggaacgcacacaaagagccaaaaaagattactgacagccatcttctgatggctgccagtaatcttttttaagttcttgttcaaaaggtttgataaaatcaaagctagaaactagctccggtcatgcttgttgcgatcattatcgcgtaagtcttctacgtgggcatcaccactcgtatcgatatctagttcttcgcggccgacgttttcacttacttgtttcatatcttcgtgttcttgtttacgaatgtcaacttcttctcgaacgaccgggcgtttgttgacatcgatctgttcttctttgattgggatcgtgatcgtgtcgtcttctagcgtatcattgacatcggtagttgcagccgcaccatctccgggctttctttcgatcacgatttcttctcgtttaaccggtacgtcgactgttttcgtctcattgacaacatttttatggatatcgactttacccgtcgtcacatcatgcttattgatatccaattgttcttctttaagctggatactatcagtatcagtatctagatcagttgcacgtgcagcatctgatgcatgtaaattatttgtgctagtgtcaccagctgcatgtctgcctgtaacattttcagttgcttgtgttgggtcgtttttataattattgacggtgataataatttttccagctgagatatcatctctatattggtaaagcgggtcgttgtttgcatggtcagcttcttcatttaaacttgaatcgtattcgtacgtatcagcagaaaatgcatctttgattttttcccatagtgagcgatcttcgtgagtcgtttcgacgccatttacgccggttttaacatcgattcctgacagtccagcaaaaccaaaatttgtagctgcatctttgttggtgtaaataatgatatcatcacggctatagccttctctttgcagttgttcgatcacggataaagcttcttctctcgtactgtaacttccaataactgttaaatttctttccaacatataaatccctcccatttcaactatttttttaaatacgcttataattgcagtataacgaattcagcaaaaactttaaaagggtagattgcaaatttaatccgaatttttggacaaatttggctcctatgatggaattacggacaaactgttcgatataatacatcataaaggagctttttattatggcaattaaatattcaaatgaatttaaagaatcgattgttagcttaagtcagactggccgttcggccaactcactggctaaagaatacaacgtcagtgtttcaacggtcactaagtggattaaacaagctgatcctaacaacactaaagtgctatcatcaaatgaacgtgctctgattaaagaaaataaacggttaaaagaagaacttgatattttaaaacgagcggcggtgctcatggcaaaaagctaattattaaagggcgtgccctcgtgttagaagtcgtcaacgctaatttacttgctgggcaccgcattacgcgtatcttatcagtactcaaaattccgcgctcaacctactatgattatctacattggcagccaagtagaactgaacgccgccggcatttaattaaacaagaagtgttaacggcttggttaagatatccaatgtatggctacccacgattaacgatcttactaaatcaacagtctgatattcacgttagtcagcgtctggtctatcaacaaatgtgtgaattagggattagatctagaatggttaaacgaatcaataagccaaccactcagactgattatgatcagcgaccaaacttgattaagcagttaactgatcaatctggtattttattgactgatattacgtacattccccttaaccatacttggtgttacctagctagtgtctataatccagtaacccgacgggttattgcttaccaacttaatacgcagatgactaaagaactagcgactaacgttattacccaagtcatggcgcaagcagttaaaccacaaattattcatagtgatatgggaagccaatacacaagtgacttatttgaaaacactttatcgaagtatggtatcaagcattcttactcccgaaagggtcagcccggcgataacgcgcgaattgaaagttttcattcaattttgaaacgtgaatacgttaatttccaagattttaagacaattcatgaagcaatcgccggaattgataactatattcgttggtataacagtgatcgtatttcacttgtagcgtagctacaggctattaaattcaataatgttggggcttatttaatatactctaaagcgtttttaaaatctgaacgggactaaaacttcggcctccctcaattgtcaagttaagtgcaacactaatggcctattcttataattggtctagaaagttaaaccagttgtggcataacatccgctggacaactatagcttaaacagcggcggggacggtgattcagcgtgtcttgaaccaactgcagatccactaatgagaggtttttaaaggaatacccctttgggaagaactctcttaattgaccattcacattctcattagtgccccgttcccagggagaatatggatgggcaaagtagatttccgttccttgaacctgatttaaactagcgaattccgagccgttgtcaaacgtgatagtccgaaagttttctgcaccgtaatcatcaatcgtatcttggagggcttgccggcaagtctctgcccggtaatcaggcaatttaacgataatttccatccggctaactcgctcggttaacgtcattaaagctggttcggactcaacccgtttggctttcactaagtcgccttcccaatggcccaactcctgacgtttccgaaccactgcgggccggtcttcaatggactgtccaagccgttttttattcaggcgggcatgtcggtgattcgggcgtttaacgcggcgacgtagcttcatgggtaaatcatagttgtgaagctccgggagcttgccagcctcgatataccgatagaccgtagccgttgatgggcagggaaagcccgggtaatgagctttgaaatagtggacatacgtgtcgacactgaaaactcgtggcttagcttttaaagctttcggcagggacttgaagaacacggcagcccgctgcagtaaacctttggggtgacacttggcccgctgttctcgatagtaagccgccccgcgctcggcaaagtagccctgatatgaccgatgtttctgggaatcaatctgggtggttaacccgcgttttaattcgcgagaaatggtgctgggactccggtgaagccggctggcaatctgacgaacgccaaatcctaatcgagtcagggactcaatttgaccgcgttcaaaagattggagttgttggtaatgcttaggcatgatattcttagtttgggtcatgaagacacctatccttatctgttgattttgtcgttaataataagaataggccttcatggccttttaagctagtctaattggtctagttatcaagtgttgcacttcaattttaaatcggggctcaaaattggaaaaagttgtttgaaaggcaaactctctcttcaacaatgagtgaaaagcttcaattggcccattatcataaggataaccttgttttgagtatgagtggctaatctgatgccgttcaagtaaagtttcaacttcgttgctggtgtactgtgaacccatgtcagagtgaaaatattgtggcttttgatgatattcaagcgcctgattaatcgtttctacaactaacgtcgcctccatctgacgaccaatcttgaaagcaagaacttgatgaacctttggttcgtaaatagaactgagataaacccaggttcctggacgtaattccaaataagtaatgtcagcacgccatatccttgcattgggctggtgcttgattaaattggggcgttgtgaatgatccacatgagtgccaggttttttaaatcgccgattcattaaagagtgaatctccatttccctcattaatcgtaaaattcgttttgacccaacacagatgcctgacttgcgaagcaccatcgttattcgtggataaccataggcacgataattattttcccaaatcaatttaattttttctttgagttgattatcaacacgttcgtgttgactaggttgatatcttttccaatggtaataggtgctgcgcggtaatttcagtgccgaaagaataattgataagcggtgtcgcaataactgatcttctatgaagacaaggcaattaattcgtcctaatgctttcccagtaacaccgccgcagcttttaaaatttcgagttcctcctttaatcgctgattttccttttgaagttgtttgaattctttggacgttacttcagtaccgtcttctagctcaactgatttagcgcctttaacccagttatgaattgcggctggagaaacaccgtattcctcggaaagcgagcgaatagatcttttctcttcacgatgcatcttcacaatgctggctttaaaatcatctaattccaaccaatatagggagtgattactttgggtacatctactttatcacgttttcaacgtggcgcactagcacaactggtcaatgaggggaataaatcttaccaagtaatggctgacgccttaggcgtcgccaaagctacgattagctatgagttggaccgagttaaaccttatgatccagaattagctcagcaagatgcagatcgcaaaaggcggaattgcggtcgtcgttcgatgctgacggcagcattagcgactttaattaccaatcacttacgattaacctggtcaccagaaaccattgcggccgcttataacttgagcactgcgtcaatttataattggcttaatcgtggctggctccccttcaaattgactgatctacccaatcggaatgtccgccagcaccgagtgagcgaaaatcgtgggaaatttacaagtgggacttccatcgaacaacggccaacaactgttaatcaacggttagcttttggtcattgggaagtagatacggtgctttctagtcgaagtgagtcacgatcatgtctggttacattcgtagaacgtaagacccgacttctatgggccatcaaagcccctaatagaacggctaaggctctaaacaccgcctttggcaagtttatgggggccttcggtccccaagtaaaatccattactgttgatcatggtaaagagtttgccaattatcaggccttagaacaggattatcagatcaaagtttatttttgccatccatattcaccatgggagcgaggttccaatgaatattttaatagacggttacgctggttcttcccgaaaaagaccaattttagccaagtaacgactgatgagatcctagcagcacttgaactaattaatcaacgaccattaaaaatacatcatcaacagactgccattgaaagattccgggcttgttcggattaaacttgtaattttggattgaagtcaatatttgagacagattttaagagacattcagaaccgcgtttaccttccacagctcaaataaatcattaatcgcgattaataacttatttgaaccctggaaagcattaaatcaggcggccatttggctcgtaagtgttgcaatttcaacttgtaagggggtctggtagcccagtgaactatgaattctcttcctattgtagaaagcatgcacatattcaaaaaggacggcagcggcagtttcataatcttcaaagaccggcactggataaacacattcctttttgagggaagcgtgaaaggattccattggcgcattatcatacggataacccttacggctgtatgagtggcggatatgtagctcagttaaacgttgattgtaatcatcgctggtatactgtgatcctaaatccgtatggataatcaggtccccagtaatggttcgatttttaaccgcgctttcaagggtctttaagactaaatcagtagccatcttttttgagaacgaatagccgataatccgtcgtgagtgcaggtccatgatggttgataagtaacaccagccattacgcttcgtttgaatataggtcatatcagcggtccatttttgatttaaaccagtggtcgagaaatcctgcttaagcaagttgggacgctgttcaaccttggttttggaagccgaagccgctttccacttattgacggtaacggagtggctatccagttccttcatgagccgggaaatccgtcgtggactgcaccgaagctgcagtggttgaagttccagattcaattcatggtggatcttcataacaccgtatcgctgcttaaattccgcaaagatccgcagaatccgttgtttcaagcccgcatcttcggcccggcgttttgaaggtttgggggatcgataacgataatactgagctctggaaacacccaaaaataaatataatttaaaatagtgcctcaaaaactgtacagtttttgagacttatttaaaagcgtgctatactgggatttgtagagtctcatattcttagtctcagaaaagagtgatatttttggttaaaatttatggttattcccgggtttcaacttcaagtcaaaatttagaagaacaagttgctcaacttgtcgacgctggtgttaatcctcaaaatatttattctgaaaaatttacaggcacaacaactcaccgacctatttttgatctactattaaatacaatctcgaatggtgatactttggttattacaaagcttgatcgctttgccagaaacacacgcgaagccttaaatagtattgaaccactgctagaacaaaatattagtattaaagttctcaatctagggactattgaaaatacaccaatgggtaaaatgattgttcgaacccttctatcagtcgctgaaatggaacgcgatatgattgtagaacgtactcaagcaggaaaagagtattcaaaaaaacacaatctaaactatagagagggccgtccaagacgtaggattggcccccatgaacaagctatctatgagtattataaaaaccattcaatcaaagaaacaattgcagcctttaatacctcaaaagctactctttttagaataattcaccaaatccaaatagaaaatctctctacatcagaaaggtagttacagaatcaacatgaagctatttagaaaaaaatataagccctttcccacccctgaaaacacacccggctatactaataaaaaagtattcgacaatttcataactgaagcttccaaaattttgcaagataccaggcgcagccaaaccgttgataaaacatctatattcgttttactaaaacatttaactgattttgaaaaattataatcatcaatccaaaccgatatttgtgaaactagcgtttcataagtatcggtttctttttggtagaaagcttcggctttcataatatggaaaaagctctccattgctgcattatctaaacatgttgctttgcgagacatactttgaaaaatgcgatgttctttcaagatatgagtccaatcttgatgctggtattgaaatccttgatctgagtggactgttgtccggtattttaaattcttagggattttcttaactgctcgattcaaaacagttgtagtaaattcaacagtagggtgtttactaacttgatggctgagaatttcacctgagaataaatcataaatacatgtgaaataggcgcgttcatcaattgtcttggttccccagcgaacttcagtaacgtctgttactagtttttgataaggacgatcagtgaagaaacgacggttgatcaagttcttagcaacggtgccaacattgcctctatatgaattatatttacgagtacgtttgttaaatgcagttgatagtaattgcagttctcgcattaagacaagtacttttttatgatttactaagatattcatacgatgtaattcaccagttacacgacgataaccgtacgctggatgattcttcttgattatttggatggtttgtttaacagattggtcagatgaaccgttcggttcatgactaataatgtattcatacgtacttttggccataccaactatttttagaatttttactagtttgtgtttaagccttagctcttggatgacttgcgcttgttgttttcttcttcctggactaaggctcttaatttttttaggtattcattctcgatttgtagctgattagcgttggcttgctaacggtaattgccggattggcaggtagatatttaccagcgatggatgaaaatccgctggtttaactaactgtacaaaaataattagcaggtcgctacaccgctaacttaggcgtttcaaaagatacatttgttttcaaagatgacacagtcacagagtatcaaagcaatgaaaaaaaacggcaaaggtacctacggaatcaaagatggtgacttgtaaattaaactcaatgacacagaaatcacagccgaactggctaaagacaaaaaatctttcaaaattgaatgggaaatgcgctaacagacatgcttgcagacgggatgaagtatacgaaggaataataaaaaaagagaaaagccgtttatagattagtgaacggcttttctttttagattagattcaaaattaaactgacctttgtattatttttcttttaaaatagatgtatatctactaatctcagggtatttcatgtgtgagcaaaaataaatccattgatctaacttaatattgatatgttcactacgaagttcagtaataatatctaaatagtttatgagtatttcattgaaaacatcctgcttaaaaactgtctgagcgtcaatagaaagataggatgaaaaaaactgatctatattagcaccaagcgtttttttctctttttctgtaaagaatttttttgaattttctagaattagagaaattgtttgtgaaacggcagatagactagattccttctgaacagcgaataattgtaagagaatgattttcaattcgcgaatatttaactccaattcatttctatttggcggatgatttaaatgccaattccaggcagtttcaataattgcttccatattgtcatactgtggcgtccaacctaagacttcgcgtgctttgtcacttgcggcaatcaaagtacttggatcaccagcacgacgcggtgccattgtcacaggaattgccttgccagtcactttgcgagcggcttcgacaatttccatatttgaaaaaccagttgatgagcctaagttaaaggcgttactatcatggccttcttcgaggtaaccgagggccaaaatatgggcgtcggctaagtctaacacgtggacatagtcgcggacgttagtgccatctggtgtatcataatcatcaccaaagatggagagttgttcacgtttgccagcagccacttgtaacacgattggtaacaagtgggtttctgggtgatgatcttcaccgattgaaccatctggtttggcaccagcgacattgaagtaccgtaatgcaacgaatttaataccgtaagctctgtcagcccatttcatcatcgtttccatcattaatttactttcaccatacgggttagttgggacttgtgggtcggattccttaattggaattgatttcggttccccataagtggccgctgttgatgaaaagacgatgtgtttgacgtcgaattcattcatcacttcgagtaaggcagtcatgccgtatgtgttattgtcgaaatatttaagtggtgcttgcatcgattcgggcacgattgagaaagcggcgaaatgaatcacaccgctgactttttcttgttggaagacgctgcgcatgaaatctttgtcgcgaatatcgccttgcatcctttgtacgtataaaggggttttgcgcactttcctttaacgcgttttgaacatcttcataaggtaaataaaattcaattgtagatttatttaattggtagattgtaacgtctccatcttttcaaaacgacttaattctacgggctataaataacttaatttgccagtgtataacgtttcagattaagctaccactatgttataataaccatatcgaaaggagatcaatctaatgaaatatacgaaaaccaaagcagtattaaatcaactcgttgccgatttgagccagatgtcaatgattatccatcagacgcattggtacatgcgtggacccaactttttgaagttgcaccccttgatggatgagttcatggaagaaattgacagccaactcgatgtcatttctgaacggctgattgcgcttgatggcagtccttactcgaccttaaaagaaatggccgaaaacactaagattcaagactggcctggtgaatgggataaaacaaccccagaacgcctcgcacacttagttgatggctatcgttacttggaagacctttaccaacacggcattgaagtatccgatgttgaaaaagacttcagtacccaagatattttcattggtctcaaaaccgcaattgagaagaaaatctggatgattcaggcagagcttgggtcggcgccggaaattgatgaataaaataatattaaaaaatcggtaggcttatggtagattgtaaaattaatccgaacgcccatttggatattggacagccctagttcacaaaaggtttcgattttaattcgttccaatcgtttgaataaataatgcttttcttctttgcgatctaacctgaataaaatcgtcgcgccattgcggattgttccgtcgctctttataaaaagcatatgtatgtttggtccgagttcgcgcgcttaaatattttttggtcattatttccacaagatagctttagcaatttcattcatactattaacttaataactataacaaactcttcattaaatacaaagattaatcggtattacacgcttctatatttgttgtacaattatctcattacgagtccaattgaggagcacccattcaatgcagtattttaaaaccctatttacaagtacattcacttttttaaagcagtcccaggcctattttcgtagtgtgttattgatgcatggctttttgcttttaatttgtctaccgcttttgagtaaagccagctacttcattctggtacataatcagatccagtttctcgcgttgagcaacttgccagcgcttattcatcagcatccgattgcgctgttagcactcgtaggaattgcgctactaattttattgctggctttcttcgaattcacgtttcttctattaagtgtgtactttattcagattaaacggccgctagctttgcaggcattgctgaagatgacttttgcgcaactcaggcaccttcgaattggcacgttctttttctttctatattattgtcttttaattttaccgctgggcgggcttggctatcattctgatttattgactagttctatcatcagctttaattctagtgccattaacattgattattgcagttatcacgccaggcaattctgttttaccatttggtgatttagcaactttaccatatatgattgctgtaatggcagctgttttccgcggtgatatttttagaacaattattgggggcattgttaatattgtcgcaagtctttatatcgcttcatgggcagcaccgttagtaacgcagtcagccaaagccgcacatttcgcaatgcaagggaattcatcaatttcagtgctcagcgatggtggtgtttggacaacttgggttattgtgggactgggtaagataatgagttggggaggtatcgggataattggaatagttactttagcaattatggtctggtacaacaaatttagaagtaaaaagctagttaaagttaattaaaaaataaggagtgaaacgcaatgaaaaaattaatgattgtttgtggtagtggtattgcaacatcaacaatagcagagggtaagattaaggaatatttagaaaaagaaggtgtacttagtcaagtacaaacatataaagggaacatagcagaatatattaatcaaattgataattatgatggatttgttagcacaactattgtacctgataatgtaaaagataaagtaatcaatggagtgccattattaagcggagtaggagttgataaggtttatgaacaaataatgactaaattaaatttaaaattttttattgatggaggtttagctcagttgggagagcgtctgccttacaagcagagggtcacaggttcgagccctgtaacctccattgagtcgttagctcagttggtagagcatctgacttttaatcagagggtcgacagttcgagcctgtcacgactcatcggccaagttacacgccaaaatgcgggtgtggcggaattggcagacgcgctagatttaggttctagtgtctatatagacgtgggggttcaagtcccttcacccgcattcaattaaatattcaatgaaagttatcttattatgccgacttagctcagttggtagagcatctgatttgtaatcagagggtcgggcgttcgaatcgtctagtcggcattaagatgcggaagtagttcagtggtagaacatcaccttgccatggtgggggtcgcgggttcgaatcccgtcttccgctttcattatgattaagccggggtggcggaactggcagacgcacgggacttaaaatcccgcggtaggtgactaccgtaccggttcgattccggtcctcggcatcataatgaaaaatgcacccatagcgcaactggatagagtgtctgactacgaatcagaaggttgtaggttcgactcctactgggtgcatataacgggaaatagctcagcttggtagagcacctggtttgggaccagggggtcgcaggttcgaatcctgttttcccgattttggaggagtagcgaagtggctaaacgcggcggactgtaaatccgctccttcgggttcggtggttcgaatccactctcctccatattttttagggatatagtttaaaggtagaactacggtctccaaaaccgtcagtgtgggttcaattcctactatccctgtttatattatagcttgcatattatgtgtgaatgtagtataattattcatgttaatgatggcggtattggtgaagtggttaacacatcggtttgtggatccgacatacgtgggttcgattcccacataccgcctttattcttgggctatggccaagcggtaaggcaacaggttttgatcctgtcatgcgctggttcgaatccagctagcccaatttactttttaagggacaggatttgttcttttatggcggtatagccaagtggtaaggcagaggtctgcaaaacctttatcaccggttcaaatccggttaccgcctttgcgtttaggcgctaaccttaattggtcaaaatgccggtgtggcggaattggcagacgcgcgggattcaaaatcccgtttcctcacggaagtatcggttcgaccccgatcaccggtataattgaacattatacagttttaaaaagccttagagatagggctttttttgttgcgttaataccatggttcttttgaatactaatagttaatatcatgaatatgcgggtgtagtttagtggtaaaaccacagccttccaagctgttgtcgcgagtccgattctcgtcacccgcttttcatgggcctatagctcagctggttagagcgcacgcctgataagcgtgaggtcgatggttcgagtccatttaggcccattatctaaataatatggagaagtactcaagtggctgaagaggcgcccctgctaagggtgtaggtcgggaaactggcgcgagggttcaaatccctccttctccgttttgtatggcccgttggtcaagtggttaagacaccgccctttcacggcggtatcatgggttcaaatcccgtacgggtcattgtaacaatgttacattttatatgttttatggagaattacccaagtctggctgaagggaacggtcttgaaaaccgtcaggtgggttctgcccacgcgagagttcgaatctctcattctcctttatattatcgcgggatggagcagtctggtagctcgtcgggctcataacccgaaggtcgtaggttcaaaccctactcccgcaattacctattttattattgaaacatttatgaaataaatagcatgcacaggaaatattgtaaatttgttcaacagctttgctcgtatggtttccttgcatcacacccttgataaggttatatttatccttgtaatcattatagaacgtttgttcaaaaaagaggaagtgaattttatgcattggttatgggttttaattgttggtgctgttattggcgcaattgctggtgccatcactaatcggggcgcagctatgggctggattagcaatattatcgctggcttagttggctcatccattggtgaagctattttaggcagttgggggccaaatatagctggtatggccattattccgtcaattataggcgcaatagttgttgtagcagtagtttctttctttttaagtcgtagcacaagataaatttttccctatatgttaaactttttaacaatcttttaaatgaatccatggttgttattggctggtcaattactgtagtaattggctttttttataaatgtt
